United States Patent Application Publication US 2026/0315545 A1, published October 15, 2026 (application 19/101,374).

The application's sequence listing, which the Patent Office published only in electronic form, follows.

SEQUENCE LISTING (2 sequences)

SEQ ID NO: 1 - DNA, 3576111 bp, Dysosmobacter welbionis (residues 1-1,788,056 of 3,576,111)
  source 1..3576111: mol_type = genomic DNA
atgcgtgagatcctgttgacatcttccgtgctgatcctggcggtcctgctgttgcggcgggccttccgggaccggatttcccgccgggcccagtatgtcctgtgggcgctggtgctggtgcggctgctggtgccggtgagcctgccgggagcggacttctccgtcctgtcggcggcggagccggtgggccggacagtgacggaacggctggaacagcgggaaatttacagagtgccgctggccccctctcccatggggacagcgccccaggtcacatcccccgcacctcagatagagggaggcggctccccctcgggggaggcggccgcgccctccggcggggaggaagccttttcttacccggtcatccgggagcgggtggtgacggcggcggacctgctgacggtcctctggctgatcggcatcgccgccatggcggtgtggtttctggtgaccaacctgcgcttctggcaaaagctccggaggacgagggcgccctatgccgcggagaactgcaggtatcccgtctatctggtggaggcaggtctcccctccccctgcctgttcgggctgttccggcccgccatttatcttacccccgccgttgtcacctctccggagcggctgcggcatgtgctggcccatgagaccgcccacgcccgccatctggacccgttgtggtcgctgctgcggagcgtgtgcctcgcggtgtactggttcgaccctctggtgtggatcgccgccgccgtctccaaggccgacggggagctggcctgcgacgaggccgccatccaggccctgggagagggcgaacgcatcccctacggcaaaacgctgctgtccctgattccggtgcggacgggtcccggctctcccctgctgtccgccaccaccatgacggcagataagcggcagctgaaggaccggatcacccgcatcgcccagggacaacagacccgggcagcggctttgtttctggttctggcgctggcagcgggcgtctgcgccgtcaccttcaccggggccaaggcggatggggaaaccggcggtgtccgctccctcaccggcgacgagctggcgtattttaatgaggagttcttcaatcaggagggtacttacagcatccgcaaccaatttttgaactccctgtacgagaagccggaggacatcgacctctttgagctgttctattgcggcacggggatcgacgcgcctatgaccgatgaggagctgcggcaggtgggcagctttgacaccgcaggggagctgatctgccctgtggacaagatgtccgtggaggccatcaaccaggtgctgctggagaacaccggcctcacgctggaggagacggggcggatcgggatggactacttccagtacctcccggagtatgatgcctactatcacagccacggggataccaactacttctcgggcgtcaacatcactgccggggagcgggtgggcgataccatccggctctactacgacgacacgttccatgttgacggctggaagtgcgtgacactggaagaacaggccgacggctcctactggtttgtctccaaccagcccagtgagcggcccgccatccctaccgtgtacccggaggggagccggtgctgaccattccgctgacagacctcacaccctatgagccggagaccatggaggccattcggcaccggaatgactgcgccgagcgtggcactggctatatcatgcacaccgaggacggcgatgaactctctgtccgcacctatctctccaccgacggcaatctctacgccgccgtgatttatgacgaggcggcgggccgggacgggatgcgcacatgggatgtgggctgcttcttcaccttcccggagcataacacgctgagttacagcgattccggcggctacgccgtctccatggactccttctccgatctgttcggccatgatgggctggtcatccgttactccggcgagctggacgaacatacaggcgccaccttccacgactattactatttcgacaccgagggaaatcccgtcctcctggcccgggtctacggtgacaccgcccagttcgacctggatggcaacggcgcagacgagttgtgtgcctcttcggcaaacaccgcacagatctttttccagcgggatgggcggatctatgaggcggacatcgacgaggatttgaaacaggcttggccggacgcggagtacttgagcttcaaccgttgggacgtgagccgccggaatctggccctgtgggcattcgtccccattcccgacagtccccaggacggcaccgccgaccggtggctgtactttgatggagaaaacctgctggtgtaccgggacggccgtgccacggcggaccacttgatggagggcgcggaagcgccggaggacgtaatggcggtcctgcgggactacgtgcaggagcagtacaccggcgaccatgaggggttgctgttcgtggagggcggcgactttgtccccgccccgctggaatatgacgactggcggattgagtccatcgagggcccctcctatgtatccgtgggcggcctggattttgccatctggagcatgaactatgaactgcacaccaccacgccggagagcgtcattttggccggcggaacgtacatgaccgaggactgctgggtcagccccggttaccccgggtgtgactacttctacttccaactggacgagggcggaacccgcacctatctgtatcaccgcatggagaacgactgcgtccccggaacagagctgtttttctcaggcatggcctaccagctccgggagatggggctgctgtccttctatgacctgacggggcgggagctgctggatatcagctgcagtcagccagtccacttcttcaacacgctgtcggagacgaacctctcggagcagtcccaggcccttgccgccatggcggcctgtgtcgccgccggagacgatcccggcactcaggagatctatgacagcattgcccattatatggaaatcttctccgatgatctgacagacggcggtcgggccgcgtggcaggcgctccagtctgccctgtccatctggacagcggcgggagatggcacggtctatgagagcggcggcctctccctgtgggtgccggagggctgggcagacatggcggcggtcaccgctgaggacgctgtctggttcggagaatctgtgccggggttcgacgtctatgagcgacttgcccacatatcaaatcccgatacaggtctggtctggaatgtccgggccctcacccgtgcccagttccaggccgcctttggggacgcggactggtcggagattttaggggcttccagctatgtgatcggctctgacgacgcctacatctatctgctctccacccccacggacgtgcagttcctggtggaggaccccaccagtatggcccagtatgagctgctgcggaatcagtcccagacggtaatcgagggcttcttcttccgcaacggtatcacccccaacccggactgcccggacgccgacgggtgctatgtgggccccgaagcttcggggcggccggaggtgaacgaggcggccaaggctgctgttcaggcggcgatggacgggattttggcccccggtgccttctccctgaccctctcccccgcccctggtgggtccggcggcggaagctatatactgccgctggatatggcggcggccatctcccggatgccggagaatttcctctggtaccccgcggaggcgggctcgcccccggcgggcctggcctccctgaccctcaccgcagaggacggcagcgccgccctccagtgctgggagggcagctccctggtccgctgcacccggagcggcgtgacacagtggttctacgccccgccggtgacggcggacgcagtcttcaacggcacggtctttgcagccttgcgccagatttatgacgaagtagaatgggaggccctgcgggagggcatcatcatcccggaccggggacagagccatctggagatcgcccaggcctgggccgatgcggatacgcagcccgccctggaggtcacagacggcagcatcttcgcctgcacctatgtgcggactgtggccgatgtggatagctgggcagatatgccggagacctcctatccggagcaatcggaggggcacgagcggttctggttctcctaccggcgcatctttgtaccggagaatgaggcggcccgcagctggcagatggccggcaacaccgtggagtacgacggcaggtacggcgaggccccggagggcgcctatgagaatttccaggtggggtcctctacctgacggatgagggctggcggtgcgacggcaccggcaccggcccgtgaattcggatcaaaaaagagagcggccgaaactccggccgctcttttctgcgctcactgggccaggaacaccaggttccggtccgtgatgaagttggggatactatacacgacgcagatggcgtcgatgccgttctccgccgcgtactgggcggggggcatccggtaataccgcgggtccagcaggtggacctcggcaaagctctgggccaggaagggtgccagggcgtcggagtaggaatcccggatcagcaggagcttgccgccgtctcgggcgttctcattctggatgacgcacaggggttggttgccgcccaggaaggaggcgtatttgtccttctcggtcaaatagctccggtcgtacagtatgccgggttccggagagccggtgcgccaggaggtgaccatgaggccgtcctctttgacccagaattccatggtgtccggcgtcagccagtggatgccggactgggagtacagcgtgccattgaagctggtactggcaatctctggtgtaaagctttcctgctttaatgattctcttcccaggacttccagcagagcattggccccatagaaggccccgagggacgtccagtggtggtctgtgcggtagaagatgggctcgtcggcgtgagcggtcagggcggcggagaagtcgatcatgggcagccccaggcccgccgcctgggagaggtaagcgttctggtcccaggactccgcgccctccggcagtttgtcccgccacacctccgccgcggaggggatcagccccagatacatggggatgtccgacttctccgccagctgggagacgtaattcaggttcgccttctccaggccgtccgcaggggcgtccaccttggagatcaatgtttcgccttcacagagatagatgttgttgaacagccgtttgccgatcagctgctccgtccgggccttcaggcccgtccactggtcccgcaggggaaactggtcctggacgtaggcctccacgtcctccatatagctgccgtccagcacgctggacagagtcagtgccggccgctgctggagggtgcggttctccacgtcggaccgctcccggtccggcaggagcatctgccacaccatcagccccccagaaagaggcagaacaccgctgtgagaaatcttgcgtatcgtttggacaaggtctctgcctcctctcagaaccggaaatacaggaaggggttgtagctgccgtccaccagataggccgtgcagaccaccagggaaaggcccatgagcaccggggtggccagctgttctgcctgccggggcagcttcgcccacagccgctggcccagagcggtggaagccagcaccagtaccgccagtgtcacggcgtagctccgcagccggaacaggtccgccccgctccagagcggcgcaccgccgaaacaggcggcaaggtagtccccgcacacgcccaggtccaccatggcaaagaggccccagcccacgaacaccacgatgagggtgtagaggtgcttgaggatcgccggggtcttctccagtacgccccgaaggacgtaccgctccaagatcagccaggcggcgaagtacagtccccacaggatgaaattccagctggccccgtgccagaagcccgtgcagaaccagacgatcaggaggttccggatggtcctggcggtgccgccccggttgcctcccagggggatatacaaatagtcccggaaccaggaggtcagggacatgtgccaccgccgccagaaggtgcccacggagtcggcgcagtaggggtggtcaaagttctcgttgaaccggaagccgaagatccgccccaggccgatggccatgtcggagtagccggagaaatcgaagtagatctggaagccataggcggcgaggcccagccagccccccagcaccgtcagcgtcccggccccctgagcggcgaggcagtcctcccacagggcgccgatggagttggccagcagcaccttcttggcaagtcccacgcagaaccgccgggcccccagagcgaagttctccgacgtgtggagccggtgccgcaggtccgctgccaccgttttgtactggacgatgggtccggcgatcagctgggggaacatggtgacgaaggcgccgaagtccaccatgttgcgctggaccggtgcgtccttccggtacacgtcgatggtatagctcatggtctggaaggtatagaaagagatgccgatgggcagcgggatgcccagctggggcagatcaatgcccgggatcagggacagattggctgcgatgaagtcccagtacttgaaaaagcccagcagagccaggttgaagatcaccgactgggccacgaaccaccgggcctttttgtcatcactgcggaacttctccaccagcagaccgtgggtgtagtcgatgatgatggagaggaacatgatgacaatgtacaccggttctccccagccgtagaagagcaggctcaccaccagcagcacgaagttccgccacctcagcggcgagagaaagtacaccagcagcgtcagcggcaggtagagaaataaaaatgtcaggctgctgaagaccaccggcgcccctcccctcttctccgtttcacacagccagccgcggcggtgccgcggctggctgcctccttacgcaaagagcgcattgaactgctccgcgatctcctcctgatggtctgccgtggcaatcatggccacataggttccattctggactacctgtgcgttggaccaggtctccatggactccgggtaccaggcgccgccctctgcctgggcgtccacccggtcctgcaggatggaggcggcggtggcagcgtcctcctccgtcccgcactccgccagcacgatctcattcaccacggcgctgatcataggggctttggcgatcagctgcttggtggccacatcggccaggccgggataggagccctccagcatgtcgccctccaagttcatcatcatgatgtcctcttcgccgctggaggcggcgtcctccgcccagccgtactcctccgccagggtgttgtaaaaggccgtcagatccacagtcttgtccgtagtcttgccgccgcaggcggtcagcaggcccatcgtcagcagcgccgacagcgccagggtcaaaaatttcttcatggtgtattgatttcctttctgaatgttctcggggaatacagacggacctctccgctgaaaagttccctctcaccgccagtatttccaattttttttcttttaccatcccatccgccctgcccttgcaattctccgccggaggcggtatcatggctctatcacaaggaaaaaggcgggagatcacaatgtacagtttccgaaacgattacagcgagggcgcccatcccaaggtcctccaggccctggcggacaccaacctccggcagaccgtgggctacggcatggatccctgctgccaagccgcggcggataccatccgccgcctctgcgccgcgccggatgcggcggttcacttcctggtgggcgggacgcaggtgaacctcgttaccatcgacgcgtttctgcagtcctatgaggcggtggttgccgcccagaccggccacgtcagcacccatgagaccggcgccatcgaggccaccggacacaaggtctgcaccgtggagagtcccgacggcaagctgaccccagccctggtcgagtccgttctggcgggccacaacggcacggagcacatggtgctgccccgaatggtgtacatctccgacaccacggagatcggcacggtctacacccgggcggagctggccgccctgcggcagtgctgcgatgttcacggcctgttcctctatctggacggcgcccggctgggctccgccctcacctcccccgacaacgacctgacattgccggacctggccgccctcacccacgccttcaccatcggcggcacgaaaaacggcgccctcttcggggaggcgctggtgctcacccgtcccatgcctcacttccgctggcacatgaagcagcggggcgccgtgctggccaagggccggctgctgggactccagttccaggccctgctggaggacgggctctacttcgacctggcccgccgcgccaacgagctggccttccggctccgggacggcgtcgcggccctgggatatcccttcccggtggcctccccctccaatcagcagttcccggtactgcccaatgagacggtggcaaagctccaggagatgggctatgaatttgagaccgaccacccggtggatgcgaaccacacctgcatccgtctggtgaccagctgggccacgccggagacggcggtggaggacttcctcagggacctggccgggtgctgaacatccaagggaccgccaaacaggcggtccctttttgtgtggtgcttcccgctctgctggcccatgggagctgtcaaactctctcgtgcttttgttcgatttctgcttgacagaaacgtttgttcgagttacaatgcaattagaacaaaagttcgatcaaggaggttttttccatgagcggctggactttcttttttattctggtaggcgtggtctttctgacctctcagctcttccgggtcatcgacgccatcgagcgtcccaaccggcggcatgaccggcggcggacagccctgcggtgagatggacgttctggaaaagctcaccatcctgacggacgcggccaaatacgatgcggcctgcacctccagcggtgggaaccggagggccaaggcggggtatatcggcaataccacctcctctatcgccgggtgctgccactccttctccgccgacgggcgatgcgtgacccttttgaaggtgctgatgaccaaccggtgcgtgtatgactgcaaatactgcgtcaaccgccgcagcaatgaggcgaagcgggccatgttcaccccggaggagctggcggacctcaccatccagttctaccgccggaactacatcgaggggctgttcctctcctccggcgtgtaccgctccccggactataccacggaactgatgatccgggcgctgcggatcttgcgggaagagtaccgcttcaacggctacatccacgccaaggccatccccggcacggctccggagctggtggagcagatggggttcctggcggaccggctcagcgtcaatatcgagctgccgtcagaggcgggacttcggaccctggccccggacaagacgaagcaggccatcctggctcccatggggcagattcgggtgcggggacagcagagccgggaggagctggtgaagtaccgccacgcccccaggttcgcccctgccgggcagagcacccagctgatcgtgggggccacggcggacacggacttccacatcctgcggctgacccaggggctgtatgaccgctaccaactcaaacgggtgttctactccgcctacgtgccggtggtggagcacgccctgttgcccgccaaggacacgaagccgcccctgctgcgggagcaccggctgtatcaggcggactggctgctgcggttttacggcttccgggcggaggagctgctggatgcaagccatccggacttcaacccccaggtggatcccaagtgcagttgggccctccggcacctggacttcttcccggtggaggtgaaccgggcggactacgaggccctgctgcggatccccggcgtgggcgtggtctccgccaagcgcattctggtgtcccgccgggcccggaagctgcggatcgaggatctgcccaagctgggggtggtgatgaagcgggcccagtattttctcaccgcctccggccgcatggcagacggcctgcggttcacaccggacagcctgctgcggaatctgatcgcggcggagcggccctccctgccccaaccggagctggagcagatgtccctgtttgcccctgtgtgagggaggttccccatgaccgagatgatttatgaatacgacggcagctttgagggattcctcacctgcatctttgagagctacgcccaaaaagaagtcctcaccgccatcagctgcggtgaggacattccattcacgttgttccctgtgcggaccgtcctgacggaccgggaccacgccgcacgggtatatcggaaggtggtcaagctgtcgccggaggcggcggacctgctgcgccgcggctttctcacctgcctgccggaccgggaaatgcacctgtaccgtctggtggtgaagctgctggaggaggggccccggttcctccgggatctgtccgatgagacgctgtatcccattctgcgggcggtgcgccacctgaacggtgaggtccaccagtacaagggcttcgtccgcttctccgacctggggggcgtactggggggcgaaatcgagccgaaaaaccgggtcctgcccctgctgcgccgtcacttctgcgaccgctaccggaacgaacggttcttcctctacgaccgtacccaccaggaggccctgttctacgccgagggccgctctgccgtccggcccctggagcacttccagatggccccgccggatgaggcggaggcccgctaccgcctgctgtggaagcgattctacgacaccatcgccatccgggagcgggaaaacccccgctgccgcatgacccacatgcccaagcggtactggggcaccatgacggaattccagggggaagcgcatttcagggcgagaggaactcccgcaaccgtttcaggccccggcgctccagccgggatacctgcacctgagacacccccaggatccgggcagtctgttcctgggtcagtcccttgaagtagcggagaagaatggtcatccgctccttctccggcagctgatcgatggactcccgcagggcgatccgctccaccatgccctcctccggggcgtccgtgcccagcatcccctccagggtgaggccgtctgcggtctcccgctggagggactccggcgtgtccgtggcgatctccacctgggcgatctcctccggcgtcaggccggaggcctcggagagctcgctgagcaccggctcccggcccagctcctgccgcagccgctcccgaatggtgtaaagtgtttgagcctgctcccgcatggtgcgccccacttttaccgcgccgtcgtcccggagaaagcgacgaatctccccggcgattttgggcacggcgtaggtggagaagcaggtgccgtagtcaaagtcgaatccctgcaccgccttcagaaaccccaggcaccccagctggtacaggtcctccgggtccacgccccggccgtaataccgccgcaccacgctccagatcaggccgttgttctcaatcaccgcctgctcgcaggcatcccggtccccctcctgggccgcccgcagcagctccagcgtggcgctcattttgtgccctgcatccggggtgccagccgcttgcgcatcaccacggtggtgccccggcccggcgtggagcggaccaccagcctgtccataaagctctccataatggtgaagcccataccgctgcgctcctccccgccggtggtgaacatgggctggcgggccttctcgatgtccgggatgccccggccgtggtcccgcaccgtcacctccagcacctggtccgggcagatgcggactttcaccaccacctggccgatggaatccggataggcgtggacgatggcgttggtcaccgcctcgctgacggcggtcttgatgtcctccagctcgttgagggtgggatccatctgggcggcgaaacaggacacggctgcccgggcgaacccctcgttgctgctgcggctgggaaatgccagcgtgacttcgttgttggccttggtcttcatggtatgtactcccccttttatcgtatcgtcaccagccggccgatgccggcggcatccaggacccgccgtgcctgctgaggcacgttccgcaccagcaggctcccgtccagcagctgcatccgctgctgggcccgcaggatcagcgcgatgccggagctgtccatgaacgtcacgcccgccaggtccagcaccagttttttcggcagcgccgcgtcgatggacagctccagctcccggagggcgttccgggccccgtggtggtccagctcccccttcatctccagcagcagattccggtccgcgcttgtggcttcgatctccataaagttcccttcttccttgtcgtttgtgtaccaagatacagggtaccccgtttttcctcccattataaggaaacggcccattcttttttgtcggaatcacaccccgccgcaaaatcttcccatttctccgcttgcatcggcacctgcggcggggtatcatgaaggtatctcaagggaaggcaggcatatacatgaaaattttgctgattaatggcagctcccggcccaacggctgcacctacacagccctgcgggagattgctgatacgctggaatccggcggcgcggagacggaaatcctctttctgggcagcggccccgtccgggactgcaccgcctgccggacctgtcagaagacgccgggccgctgcgtgttcgatgacgatatggtgaacccaatcattgagaaggcccgggaggcggacggcttcgtgttcggtacgccggtctattacgcccacccctccggtcgcatcctctccgtgctggaccgggtgttctacgccggaaaagacgccttcgcccacaagcccggcgcggctgttgcctccgcccgcagggcgggcactacggcctctgtagatgtgctggacaaatatttcaccatcgcccagatgccggtagtttcctctacctactggaacatggtccacggcaacacgccggaggaggtgcgccaggacgcggagggaatgcagaccatgcggaatttggcccgaaacctgctctggatggtccagtgcatccaggcgggaaaggccgctggactccagccgccccaggcggagagcgaggcccggaccaacttcatccgctgaagcgcgaaagcccccggaggggatttccctccgggggctttgctgtatttagggctctttcatgtttgctcccacaccatgggcgtgtatcggatgccgtccggggacagctgttcctctgccgtgggagaaaagcccagatggcggtagacctccactgcatagggggagctgtgaaccgtgatccgcccgcggccgccctccgccagatatgcctggaacaggaggcggccgatgccctggcggtgaaacgccgggtctacgaaaaacagggcgatgtggctcccctccgccgccaggactcccaggagctcctgcccctcccaagcgccaaatagtgtcaagtgatttacctgttcaatatctgaaagataagcacgaaatgcctccacgccctccggcggatactccggcgcctcaaattcaaggaacacccgccagcacaggtccatggccgccggaagctcgccaccctgtatgcgtcgaatctccatcgcacacctcattcccccagaagggaccgtacccggtccagcgcctccggcgccgacggcttgatgccgatcacgggtacggtcagccctgccgactccagtgccgcccggagagatgcgataaacacgccccggccgggcagttcccggtcctggtccgaggtggtgttcaccccgcagcagggggagcggtccatacctacgatgcccagcacggcaaatccgtgcttctggtactcccgaatctgccaaaccacctgatccgtcagctcccgcagccgggcagatgcctccggctggcccatggcccggcggatgcgggtgttctctgcctccactggtcgttcccctcctttgggatctccccggtccagccccagacagcacagctccgggcacggcatttgagccacgcttacctgagcatccagaatcagccgcaaaatctcccggtgggcggcaggcacctccgccgtgccgtcggaaatggcgttctgattcagcaggcagtgggccagaaacaccacacgcctgctccttccgtcggtaaacatcccgtctctcctttcatcggcggggacttcccctttctcagcctctcagacatctcagcgcagacagccggtgacgaacttcaagggcacctccatccgcgcggcgatctgctccggcgtcatgccctggtcccggaaccgacggcagacggacttcatattctcacccacctcaatgatgtggcggtccgggtcatagagccgcaccacccgctgcccccagcgatgctccaggggcgggcggacgtacaccacatccgcgcacccaaccaggtgcgccaggaagccgtcgaagtcgtcctcctcaaagtagacctcgctgtcatttgcaccaaagcggatctcctccgcctcttttccaaggaaatccgtccaggtatccagtgtttggaggcacaggccgccggtgagggtcacgttggcaccgaaatccatcaccacatgaagccccaggacctcccggtaaaaggtcttggaccgctccatgtcccggactgccagcaggggatttttcagcttcacaagatcagccctttcttgaaacggattgtgctgccgggcctgacggccgtctggacagcacccttgctctatgataaaattgaaaaaaccatacagggaggattctgcgatggcaatcactgtcaatatctattacacgggcaaccgcggagctgcccggaaattcgcagaggagatgaccgtcagcggcgtcgtggatgcgatccgggcagaggcagggaacctgcggtatgcctatttcttccccatggaggacccggagactgtgctgctgatcgacagctggcgagatcagcaggctttggacacccaccacgcctcccccatgatggcgcagatcgcccggcttcgggagcagtacgacctgcacatgcgggtggagcgatatctgtccgatgagacgccaacaacctctcaggatgaggcgtttatccgcagataactgcaacccccgactgcaagaaaggggcggcggtcagagccgggcctttggtccgggctctgcccgccgcccctgcattctgttttggaacgtggggggtacgttctccttcagccgggacttacgcctgcatggccttggcggattcctccagcttggcgatcagctctttgtacttggcggccttctcccgctcggcgttcaccaccgcctccggggcccgggagacgaacttctcgttggagagcttctgctcgacgccccgcaggccgttctgggctttctcgatctccttgcggatccgctccagttccgcggcgatgtccaccagctcactgaggggcagataagccgtggcattgtgggtgacggcagtcaccatgccggacacatccgccggggcggcgtccgcgaacttcacctcactggcataggccagccgctggatgaagtgcctgccctgggcgtagacgtccggggtggcggtgacgatcagcacctccgccttccgggaagggggcacgttcatctccgcccggcgggcccggatggccttgatggtgtccatgacggcctccattgcggcttcttcctccgggaaggccaggtccgcccggtactcaggccaccgggaggtcatgatgaattgttcctcgtggggcagggcctgatagatctcctccgtgatgaaaggcatgaaggggtgcagcagcttcaaaagctccgttagcacaaagcagagcacattctgggccgccagcttggccccctcgtcctctccctggaggcgggtcttggtgagctcgatataccagtcgcagtaggtatcccacaggaagtcgtagaccttggcggaggccacgccgatctcgtaggcgtccaggttctccgtgacctccttcaccagggtgttcagcttggagaggacccacttgtcctccggcgccagggcgtccgccgcagggagttcacacttgtcgatggtgaggttcatcatcacgaaccggctggcgttccagatcttgttggcgaagttccgcatggcctcgcacttctcggtgtagaaccgggtgtcgttgcccggggagttgccggtgatgaggttgaagcgcagcgcgtcggcaccatacttctccgccatctccagcggatcgatgccgttgcccagggacttggacatcttgcggcccttgtcgtcccgcaccagaccgtggatcagcacggtgtggaaggggatctggtgcatctgctcacagccggagaagatcatccgggccacccagaagaagatgatgtcatagccggtgaccatgacgctggtgggatagtagaagtccagatcagcggtcttttccggccagcccagggtggagaagggccacagggcgctggagaaccaggtgtccagcacgtccgggtcccgggtcagatgggtggagccgcacttttcgcacttggtggggtcctcccgggagacgttgatgtggccgcagtcgtcgcaggtccaggcggggatctggtggccccaccacagctggcgggagatgcaccagtcatggacgttctccatccagttggtgtaggtcttggcgaaccgctcgggcacgaacttcacctcgccctcccggaccacccgcagggcctccttggccaggggctccatcttcacgaaccactgggcggagatcaggggctccacgtcattgtgacagcggtagcaggtgcccacattgtggttgtagggctcggtcttgacgagatagccctgctcctccaggtccttgacgatctgcttgcggcactcgtaccggtccatcccattgtaggggccgccgttctcgttgatcctgccgtcgtcgccgatgcagcggatgacctccaggttatggcgcaggcccacctcgaagtcgttggggtcatgggcgggagtcatcttcacggcgccggtgccgaagcccagctccacgtagtcgtccgccacaatggggatctcccggttcatgatgggcaggatgcaggtcttgcccaccagatcacggaaccgctcgtcctccggattcacagccacgccggtgtcgcccatcatggtctcgggacgggtggtggccaccaccagatcgccgctgccgtcggccaggggatagcggatataccacaggtggccgggcttgtccacatactccacctcggcgtcggacagggcggtgatgcagtgggggcaccagttgatgatgcggcttcccttgtagatcaggcccttgtcatacagctcgcagaaggtctcccgcacagccttggagcagccctcatccatggtgaagcgggagcggctccagtcgcaggagacgcccatcttcttctgctgctccacgatgcggttgccatactcctccttccacttccacacccgctggaggaacttctcccggcccagatcatagcgggtcaggccctccttgacgcgcagttcctcctccaccttgatctgagtggcgatgccggcatggtcggtgccggggacccacagcgtggagtagccctgcatccgcttgaagcgggtcaggatgtcctgcaatgtgcagtccagggcgtggcccatgtggagctggcccgtgacgttgggtggcggcatgacgatggagaagggcttcttcttgggatccggatccccgttaaagcagtcgttgtcctcccacatctggtagatacgggactccacctgttggggttcatacaccttgggcagttctttcatcatacgttcgatctctcctattctctgaactttcgtcctttttgtcatgactggggcgccggtccgcaccgccctgccgttcaccagatcgcagctcagctccagcggaatgctttatgcgcgcttacacagcaaaaacgccctgggcctttcggctcagggcgaacaaatgtccgtggtaccacctggattcgggaaaacccgcactctgcggcgcatttgcgcctgccctgtcaacggtgggcctccgccggggcttactgatgcttcggctccggtgctccgggacgacttctccggcggctttgggagaactcacaccaaccgttctctctcttggccgctgcccaccggatactgcttcccttcctcgcagtttgccatattttattttagtatagtataccccggttcgattgtcaagcgtcagctcagccgcaggatctccttcttcagccgggagatgatgcgcttttccagccgggagatgtagctctgcgagatgcccagctggtccgccacctctttctgggtctgctcttttccgccccccaggccgaaccgcagcgtgatgatctgcttttcccggggcgagagaacgttgatggccgccgccagcaggtcccgctccacatcctcttcgatggggcgcatcaccacgtccgcctcagtccccagcacgtcggagagcagcagctcattgccgtcccagtcggtgttcagcggctcgtcgaaggacacctcccccttccgcccggcatttttgcgcaggtacatcaaaatctcgttctcgatgcaccgggaggcataggtggccagcttgatgttcttgtccgtccggtaggtgcccaccgccttgatgagcccgatggtgccgatggaaatcaggtcctcgatccccactcccgtgttctcgaaccgccgggcaatgtacaccaccagccgcagattatgttcgatcagctccttgcgggcgtcctcctccccgatgcgctccagcagctccgcctcccgctcccggctcaggggcggtggcagggtgtcgctgcccccgatgtagtgcagctccgccggcggcagcagccccacccgcaccagcagccgccgccattgtttcatccagtccttcatggtttcttctccttccagccgtgccgccccacagggcgctgtatcccgtccccagctctgtgggggaaaaggcaaccggcagtccggcataccgctccccgccacctccgtccagtcgctgcgcaccgccagcagcagtccgcccgccactcccaccgcgtggtaggggatcagacggaaccgcagctccggcgccgcccgcatcatgggctccagcagctctgcgggacgctccagcgctccgcggtccagcagagagcggacctctcttggaagcgcaccgtccagccgccccggagacaccaccagcaccggcgctccggagaccggatcccgcagggcgtttcccgtgtcgcagaaagcggtaaacgccgtggtccgcccggccagacacacctgtgcccgcaccagctcgccccggacgccctttcccgccgccgcacgaaacaccactgtcagaaccagataggccgcggccgcagcggtcagcagcacctttgcatccacgtccgtgtagaacacgccgttcaccatcggcacgccgccccccgccaccaggcccagggccagcacgcacccggccatggcacaggagacggcgaacagtagcagcgtcagccgcagcagctttgcctctcctccataggccgccagcgccagcagtatgcctgccgccagcttcaccggcgttgcggagagaaagcccagccccggcagaaataccgccacggcataggcgccccccagcaggcccgccagaaggtagcgtctccgccggaggggaatgcccgccagacgcgcggcgcagagcaccagcagatagtccatcagcgcgttcagcacaaacacgctgtccacatacaccacggtcaagcgatccgcctcccttccgttccgtgggactattatagggcagaccgcagagaaatacggtcgcaaaagggggacgcgccctgtaaaaaggtgcgtccccccggcagccgattggggccgcagcacaaatgctgcggctccggcggcatggaaatactgtgatgggaaataactttacagcaatgataaatacggaacaatcagcgatgccagcatggaaatcaccagaatgaccaccaggatcgcggcaaacagtctgtgcttgttgctcacttgtttccctcctccgtcaggatcttgcggatgctcttttccgccttgctgcggggcagcatcagctcatgcccgcagcccaggcacttgagcttgatgtccatgcccacccgcagaatctcccactgggtgctgccgcagggatgggctttcttcagctccactttgtcatgcagatgcaggtccatattggcctccttgtcaaagcagcctcccgggctgcatatagtaacggtatggaacaacacgccgccgttgcggcagataggatgcgattacaatatgccggaaaacaagctgtatccgccggagggcctgcgccctccctcttctttcacgctccagagcctgcgggaggccatggagcagaacacggtgctggaggatcgggtcctccggtgtgatgccggacacaacctgcttctctccctgggaggcatccaggcccgcattccccgggaggaggtcctctccccctggatcagcggggcccagcgggacatcgccgtcctctcccgggtgggaaagcccgcctgttttctcgtgacggccctccgggccgatgaaaagggcgcgcccacggcactgctctcccgccgggccgttcaggagcgggccatggacttcttcctggagcacctgcgcccaggctccgtggtcactgcggtggtgacgcatctggagtccttcggcgcttttttggatatcggctgcggcatcgtggctatgctgcccatcgagcacatctccgtctcccgcatttcccatccgaaggagcggttccggcccgggcagaagattctggcagccgtccggtccatagaccgggagaagcgccggatcaccatgactcacaaggagctgctgggcacctggatggagaatgccagctggtttcatcccggcgagacagtccggggcgaggtccgcagcgtgaaggagtacggcagcttcatcgagctggcccccaacctctccggcctggcagacgcccgggaggacctgcgcccgggggacggcgtctctgtctacatcaagtccatccgtccggagcggatgaagatcaagctccaggtgatcgaaaagctgccgcccttggcagagccggagccgctgcgctatcagatcaccgacggggtactggaccggtgggtctactcccctgccgggtatgagaagccggccgtggagacggtgttcacggctgaggacccttgatctcgtcccagtagtgcttggcggcctgctccgtcttgttatcgccgtattcgtagtaatggacacccttcagggcatcgggcagatactgctgctgtacccagtggcggggaaagtcgtgggggtacaggtagccctgctcccgctccataccggcggagtccgcgtgaacgttctgcagttcccggggcacgtccccggtgcggcctgccctcacgtctgcccaggccctgccgataccggctgtcacgctgttggacttgggggccgtggccagcaggatagccgcctgggccaggggcagctgggcctccggcagccccagctgcatggcagtatccacacatgccttcacaatggagaccgcctgggggtacgccatccccacatcctcgctggcggagcacagcagccgccggcagggggtgatgaggtcccccgcctccagaaagcgggccaggtagtggagcgccgcatccgggtcgctgccccggagggacttcatcagggcggaggcggcgtcgtacatggcgtcgccgcctctgtcgtaccgcatggcgctgcgctgggccacctgctccacgtcgtccagggtcagcatcagcttcccatctctgggcatggctgcccggcacagaagttccaccgcattgatggccttgcggacgtcgccgccgcaagcggtggcgatctgccggggcacatcctgctcccagtccaggggcagaggcgaacggtcctgctcgatcttcagtgcccgcaggacagcgggttccacctcctccggcgacacggccttgaactcaaacaccgtgctgcgggacagcagggctccgtacacataaaagtacgggttctccgtggtggaggcgatgagggtcaaagagccgttctccatgaattccagcaggctctgctgctgcttcttattgaagtactgaatctcgtccaggtacagcagaatgccccctggggccagcagcgtccccacgtcggcaatgatgtccttcacgtcctgcaaggatgcggtggtggcgttgagccggtggagggtcttattggtctgccgggcgatgatgttggcgatggtggtctttccggtgccggaggggccgtagaacaccatattcgcctccgtgccgctgtcgatcagccgccggagcacggcgccgggggagagcagatgccgctggcccaccacctcgtccaatgttttggggcggatctcatccgcaagaggccgctgcatggcggcacccccttccctgttgatctcggaacattcattatagcatggcccattggaaatttccaccgggaaaacgccaaaaagccgggaagacagtccgtcctcccggctttcggcctgtaaactcagccaacggtcttccagtgcttgtccacgtggttcaaaatctcgcagccgtcctccgtcaccagcactaggtcctccacccggacaccgaattcgccgggcagatacacgccgggctcaatggagaagatcatacccggcttggccagggtggtgttggtggcgctgacgtcgcccttctcatgctccgtctggccgatgaagtggcccagccggtgggtgaagtattctccgtatccggcggcggagatgtggtcccgtgcggccttgtccaggtcgcacaggggcacgccgggccgcagcatggactccgccagctcgttggcctcccgcaccaggtcgtggatggcggcgtacttgggatccgccgccctgcagaagaaggtccgggtcatgtcggagcagtagcggttcttccggcagcccatgtcaatgacgatgcagtccccagccttcaggcgggtctggtccgcctcgtggtgggggtccgcggcgtgggcgccgtaggagacgatgggcaggaacgcagtggagtcacagccctcggcggcatactgggccacgatgtagtcggccacctcccgctcggtcatgccctctttcatgtaggcggcagcccgctccatcaccacgtcgttgatgcgggaggcctcccgcatcaggtcccgctccaccgcgtccttgcaggcccgggcgtcgtccacgcagtcggaggccagcacatacttgcagctgggattgtgggccatcaggggcagcagaaaccgggcgggccagtccttgtccacgcccatgtctttttccccgtccacggcatttgccagaatggcgagatagtcgtccgtgtcggagaaccacacctgctcatagggtgcctccggcaccgggaacagtttgttcagaaataacttgtgctgtccgtccttccgcaggtaaaaggcgtacagccgttcaaacgggaacacatcgtaccctgtcagataccagatgctgtccggatcggacacgagcatctgctccaggcccatccgttccatggcggccagtacgcggctgattcgctcctgatacatgatgtcacccctctttttttccgataatggtctccaccagctccggagagaccagagcctttacggtcttgacgccggttttcagggactctaccggcgcatactcgtaccggccgtgggcgttgtggcccgcgctgggcaggttggggcacagcaggcccttgtaggtcagcacactgccgtcagtgccgccccggatgggagaatgggtggggtgctcaatgccggcggccttcatggcggactctgccagctccagaatctccatgtggtccttcagcacctcgtacatattgtagtactggtcgtgggtgtccaccaccgcggtgccgtcgccccagcggcggttgatctgctccgcggccttgtccatcatggccttgcgctcctgaaaccgcttcatgtcgtggtcccggacgatatactccatcgtggccttctccgccttgccgtgcatctcctgcagatggaagaagccctcgtacccctccgtgtgggcgggggtctccagcgccggcagcagggcgttgtactccatggcgatcaacagggcgttgcgcatcttgtccttggaggtgcccgggtggatgctgaagccgttgatggtcaccacggtcttggcggcgttgaaggtctcgtactcatagtcggtgatatcgccgccgtccagggtataggcaaagtccgcgccgaagccggatacatcgaagaagctggcgcccatgccgatctcctcgtccggggtgaagcccaggcagattttgccgtggggagccttctctgccagcagctcctccaccgcctgaaggatgatggcgatgcccgccttgtcatccgcccccagcagggtggtgccatcggtgcagaccagctcctgacccacgaatttctgcagctccgggaactgggcggcctccatgacgatgttctgctcccggttcagcaccacgtccccgccggtgtagtggatgatctggggtttcacgtccttgccggtcatgtccggggtggtgtccatgtgggcgatcaggccgatggcgggcagctgttcgcaccccggcgtggcatccagggtggcgtagacgtagcacttgtcatcgtaccgggcgttttcgatgccaaggccgtggagctcctctaccagcagcttggccatgtcgaactggcggtccgtgctgggggtgacagtgcggccggcgtggtagtcactctcgctgtacaccttggcgtagcggatcaggcggtcaacaacggtatccatgttctagattcctccttattcttccttggagagcagattctccggattcaggcatttcaattcgtccagcacgaagaggccgtccttgcggatcagcacgtcatcgaaccagatctcgcccccgccgtactccggcgtctggatctggatcaggtcccaatggacggcggaatggttgccgttggaggcattgtcgtagctgttgccgggggtcaggtggaagctgccggcgatcttctcgtcgaacagaatgtccccgatggggtggttgatctccgggttcacaccgaaggcgaactcgccgatgtaccgggcgccctcgtcgatgtccaggatctcgttcatatagtccgtgttgttgctggtggccttgacgatcttgccgtccttgaactccagatacacgtcccggaacaaaaagccgtcatagggggacggcacgttgtaggtgatgtgcccgttgacggagttcttcacgggcgaggtgtagatctcgccgtcggggatgttccggttgccgtgcatcccgaagctggggatgcccttgatggagaaggagatgtccgtgccgggagcgacgatgcgaaccttgtcagtcctggccatcaggtcctggaggggctgcatggcccggcccatcttgtcgtagtccaccaggcaggcccggaaatagaagtcctcatactcttccgtggaaacgcccgccagctgggccatggcatcgttggggtaccggagcacggaccacttggtatggttgcaccgctccgccagatggatggggccccagtaatactggcggtagcgcttctgggcctcgtcgctgacgttgtgccacatgctgatattggtggtggcccgaatgtcgatataggcgtccatgtcccgcatccgctccagctcgtaggaggcgatctcctccatgtgctccgcgtcggctccctggaccagggcaccctccacggcgtagtcgaagatgtggacaaagggcttgccgcccacagcataggcttcctggaccagggacttcatcaatccggtctcactgccgtggagctcaatcaggatcttctcgcccttctccaggcccacagcgctgcggatcaggaactgggcgaatttgcggatacggggatcttccatggtggttcctctctttcctttcagtccttgcgcgtcaccgcacagaaaaaacggggcagaagagcatctcttctgccccgcctggaatcagttgtcctggtacagggcttccagagaccgcttgggatcgttgcagcgggtcacggcgctgacgatcagtatggcaatcaccgaggcaggcaccgccacaatggcgcactggatgccgtagggcgtgcccatcagcgtccagatgatcgtgaccagaccgcccaccaggataccggccatgccgccggcgggcgtcaccttcttggagaagagggcgaacaggatcgccggggtgatggcggcgccgtacatggtgtaggccgtcatctgcagggacagcacagtggggaaatacagcgtcagcgccacagcgatgaagctgaacacaatgatggtaccccggaggaccagcatcttctgcttgtcggtggcatccttgcggatgtactttacatagatgtcgttggtcaggttggtggcagaggagagcagatagctgtccgccgtggtgacgatgaaggccatgcaggcgcacatcaccagcgcaccgaaggccagaggcaggtagtccaccgctacctggaagatcacattggagggaacgtccagggtgggatacagcttggctgcctgggtgactaccaggacaatgctgatgatgaccaggatctcgccgatgaacatgccgatgttggacttcttggcctcgtcgctgtttttggcagaggcgaaccgctgcagcatgttctggtcgcccagcatcagggccagggagggcaggaagtagcccagcagctcccagccggacataccgccggtaatggtcatcttctccggaggcagagtggcgccctgagagttggccacgccgatcaggaagggaatcgccaggaagaagccgccgatcatcagcagggcgctgatggcgtcggaataggccacagacaccagaccgccgcccacggtgatgatggcgatcagggctgtgcagatggtcagggccaagccgtgggagatctcaatcccgctggaagcgcacagcagcacgatgatgtccgccgcagccttcagctgggtggccagcacgcccacataggccagcatgacgcacagggcggcgatgatgctggcggccttgccgtaacgggcgcccatgatctccggcaccgtgaccttgttggacttgcggaccttgccggcgatgaaatacagcaggatgatgccgatgggcggcgccgcaaaggtgatgagacccacccaggggccgccggtgtacaccacgctggcggagccggtgattccgccgccgccgcaccaagtagcaagcagtgtgcccaccaggatgatgaaggggatccggtggccgccggtcaccatgtcatccgaggtcttgactttcttccgggccacgatcagcccgaagatcgtgagcagcaccagataggcgctgatcgcaacaatgtaagtcatatattctccttctcctcacacaatagaataataaagagattttactctttcaggggaataatgtcaagttgtatcccgtccggcgtatgcgccggcatccggacgcggcaatttttctctggctttttgtcgaaatctgtggtatcctgtccccgaggtgagcgacatgacatccaaggctgcggtgaaccgcatcattgagacactgaagggcatttacccggacgggctgtgctccttacaatataaaaaggactacgagttgctgtttgcggtgcgcctgtccgcccagtgcacagacgagcgggtgaacaaggtgaccccggcgctgtacgcccgcttccctaccctggaaagttttgccgaggcggatccggcggaggtgggagaatacatccactcctgcggcttttacaacggcaaggcccgggacatcgtggcctgtgcccagaagctggtgaatgaatacggcggcagagtccccggcaccatggaagaactgaccggccttcccggcgtggggcgcaagaccgccaatctgattctgggggacgtgttcggccagcccgcctatgtctgcgacacccactgcatccgcatcacgggacggctggggatcaccgacggctccaaagatccccttcaggtggagcggcagctgcgggagcggatccctcccaaggagtccaacaacttctgccaccggatggtgctcttcggccgggatacctgcaccgcccgctcccccaagtgcgagggctgccccctggcaaaggactgcgacaccgccaaagccgccagacggggctgacagcattggaatcactctggaacttcacgtgtctgcgcaatgcgcaggcacgtttttttgtcttccctcatatactgagatgaaatccatccgacagacggcacaaggaggcactatggacgaacagacggcccgtatgatccaacagctgaaaagcaaccccgccatgctccaggcgctgatgcagtcccgggacgggcaggcgctgatgcagatgctctccgggggagaccgtggagcatctctccagcgggcggcccagtccgccgccaagggcaacccggcggagatggtccgcatggtgaaccagctgatgcagagcccggacggcgcagctttgatcgaccgcatcaacaagaccatgaacggccggtaacggcaagtacagaaagggggcggaccggcggtggcggaattcgacgataaactgaacagcattctctccaacccggacgccatggcacagatcatgcaactggcccagtctctctccggtgggaccggaggaaacaacgccgccaatgcgccgccccctcccccgtcccagccgggcggttcttctcccggctggggccagcagccgcagactccgccgccatccggcggcgatcctctctccgccctggccggtgggctggatccgcagctgctcctgcggttcctgcccctgatccaggagctgggaggagcacgggactccaacgcccggcagctgctgtacgcactgcggccctatctcaagccggagcggcaggagaaggtggaacgggctctccagctggcgcgcctgttccacctgggccggaaatttctggctggatgggaggggtgagacatgtataaccgctacatccgcaacgaccagggcacctacacccgtatcccggaggaggagccccggcatacacagggcggcacctccccttccggtcagccggaacacccgccatccggcggcgggcagcagcctccccattgggacagcgcccccccgccccgccctgatcctcccccctccggcgagaatgggccggacagcctcagcagcctgctccggcatctgctggaccagtttcacctgagcagtgtggattccggggacctgctgctgttggccatcctcttcttcctcttccgggagggcgcggatgaagagctgctggtggccctgggcctgctgctgatcttgtaaatgacagaaaaaacacgccgcaagcattctgtgcttgcggcgtgtggcgcagaaggagggatttgaaccctcgcggcgttttttagacaccctactcccttagcaggggagccccttcggcctcttgggtacttctgcagatacgatattcactgattaaagatgtggcggagagagtgggattcgaacccacggacgcttgcgcgtcgccggttttcaagaccggttccttcaaccgctcggacatctctccatcatggaaaggcgccatccgtcggacgcctgattattatactatatcgattggcgatttgtcaacaatctgctcccatttttatttttttaatttttttcattttaggggttgcatttccagaaacagtatgctattataactgagctgacttcgagcagcacatttccgggtgtggcgcagttggtagcgcgcttgactgggggtcaagaggccgtgagttcaagtctcgccactcggaccaatcgaagcatccaatttggatgcttcgattttttttactttcaccgacatctcccctggcttgtttgtgactggccgcacacattgcccgctcggcaatgtgtgcggccttattgttcagaatataccggcggaaacaaacacagcatccatgttgtacagattgcggcgggcgtcttctgattcgcagtcccccctgctcttccgctgccgacctagctgtccggagattgcatgccatgaccggccatctaaagatttccccattttgaaacttttttcgacaaaccggcgtctattaggtagagcagaaccaaaagcaacagatcacataggctcccgaggaggactcccatggtttatacaaatgatagagccgcagacgtacatagctcaaaagggcggcgtagaaagcgctcccgcagactgcgctggcctttgaagcttttctgcatgtgtctggtattgtctgccgtggttttgactatacgcacagtgagatccttttccgcccccatgtctgcgttggagcctgcggaacaactgacggagcagcacccggagtcttcgctgcaggaacccgatgccctgccgccggtcgagctgaatccggccccccagtccggcgccgttactccggatgactggcagatcctgctggtgaaccgctggaaccctttgcccgatggatacacgtttgaacggacaaagctgaagtatggccactcggtggattccagagcatacccggatctgcaggagatgatggacgactgccgggcagcgggattggacccggtgatctgctcgtcctaccggacacaggccaagcagcaggagctgtacgaaaacaagctccagcgtttgatagaagagggatattcatacgaaaacgccgtcacggaggctggaactgtggtagccgtaccgggcaccagtgagcaccagacgggcctggccctggacattgtagacgcctcctatcagattttggaccaggggcaggaggacaccctggtccagcagtggctgatcgagcacagctgggaatacggttttgtcctgcgctatcccaacgccaaaagcgagatcacaggcattatctatgagccctggcactaccgctatgtgggccgggaagccgcccgggagatgacggagcttgacctgtgcctggaggaatacgtggactggctctccgcccagtgagccatcgtatatatgcaaacgacgccttggacatcgtatctgtccaaggcgctgttttgtcatggttcgtcgtgctcactgccgtctggccgtgcggtaatcgtcgccgggccggtagaagggacagtcccgtgtgccgccacggagaaaccgctccatttcgtcctcgtccaggtccgcttcgcagacgtaagccgccagttcctcgtcgtagtcgtagtagacacactcctcgcaatttgccgacatgctctctcctcctcacagcaggacggcgtacaggccgtccacgtccagtctttcccggatcaccagggcctccagatccgcccgggccgacggcggcgcagaccagcacatcccgcagccggcggtgatgctccggggcaccggaatcagccgccccggcagccccgccgcctggcaggcccgctccatggccatggccccggtggtggtggcgaaagttaccacgaaccgctcctcttttttccgcatggtcagactgcctccgccgccaggatacggaccgcctctgcagccgcgtcggtctctgcctctgtattgaaataggaccaggagaaccgcaccgcgccctggtcctcggtccccagcgcccggtggagccggggggcgcagtgggcgccgggccgggtggcgatctcaaaccgctccgccagctcgtccgccacctccgaggagtccagatcagcgatattcagggacacgataggcgcccggagctgtacagcaaaattcccatacacttttacgccaggaatggttctaacggtttcatagaaccgccgggacaggacggactcgtgcatgcggactgcgtcccaaccggtacgcttcagaaacgccaaagatgctcccaggccggcaataccatggctgttgagggtccccgcctccagccgggtgggataggcctccggctgggtctcagagtagctctggacgccggtgccgcccacggcaaaggggcgaatctccacccccgctcccacacagagcccgccggtgccctgggggcccatcaggcttttgtggccggtgaagcacaccacgctgatgtgctgccgttccatgtcaatgggaaatacccctgcggtctgggaggcatccagaatgaacagaagcctgtgcttctggcagaagttccccacccgctggatgtccatcagatcccccgtcaggttggagccgtgggtgcacaccactgcctttgtattcggccgcaggagccgctcaaagtcctcgtagtcaatccgcccctgccggtctgccgggacgaagtccaccgcccctccctgcgcccgcagtctgtacagcggacgcagaaccgagttatgctccagatctgtggagatcacatggtcccccgcccccagcaggccggagatggcgatgttcagcgccatggtggaattgggcgtgaaggccacacggtccgcccgggaacagccgaagagagccgccagcgcctgacggacgccgtagatgctccgggccgcctccagggcctccggatgggtgccccggccgctgttgccgtagtcattcatggccgcggccaccgcctctgccacactgggaggcttgggccgggtggtggcggcgttgtccaggtagatcatggcttgatgaccttcccggcattggccagggcctccacaatggcgtacatattcgtgacgccgcccacagccagcttctccgccagaccgtaaaagttcaggcaggtgccgcaggtgaggatctccactccctgggcctccatattccgcaggtcctccagagattcggaaccctccaccgtcagcttggcaccgccgttatagaacaggacggtcctgggcagccggggcagctggctcacggcaaaaaggaagctcttcatcagcagcttccccagttcgtcgctgccccgtcccatagtctctgaatccacggccaccaccaagtcgccccgggcgtccggaacacaggtcagagcaggttcctccgccggggcatctcccaccggctccgccacttccatggtcaccacaaacaggtgctctcccttcttctccgcctggaccggcaggtggttccccgccgccatgcgggtcaggttctgcaccgcgatctcattgtccacccggacctccagcgttcccggctctcccagctcccgcagggctttcgtggccttcaccaccggaacggggcacggctcccccacagcgtccacgatcacagttttcatcttgttctcctctccccgcccctcggcggctgtgtgttttatccgttcgcctgcggcaggacggaggatttagagcccgtccccaggcgatctttccggccgcataccgctcgaccaccagcctaacgctgcccgcgcgcacagaatcatcatccggaccggcagggacagttccgctgcggagcggttgccgctccttctaggcgggacggcactctacggccattgtatcgtctctttcctggaaaagcaagggatgttttttgaaaagaacatcgctctgcctgtctgtttgggaaaatcaaggactgtttttccgttttttgggcaaatttcttgacagagacatggatgtgctcgtaaaataggacacatctatagcaccgcaaaattcgacgcggtagagtttatgaagatttgaggctgttgatatgaagaccccctttgtcacaaaggaccagctggaggccatcgccgcccagtaccccaccccgttccacatctatgatgagcagggcatccgggagaatgcccgccgcctgcggaaggcatttgcctggaatcccggctaccgggagtatttcgccgtgaaggccgctcccacccctgccctgctgaagctgctgcacgaggagggctgcggctgcgactgttcctccatgacggagctgataatctcggagcggtgcggcatcaccggtgagaacatcatgttctcctccaacgataccccggcggaggaattccagatggcggaccggctgggcgccatcatcaacctggacgatctgacgctggtggactatctggagcggtccatcggccatgtgccggagaaaatctgctgccgctacaatcccggcggcgtgttcaccctgggcgagacccgggagggcttccaggtgatggacaatcccggcgacgccaagtacggcatgacccgcgcccagatcgcggaggcatttacccgcctttccgccatgggcgccaaggagttcggcatccacgccttcctggcctccaacaccctgtctaacgactactaccccgccctcgcccgcattctcttccagctggcagcggagctgaaggcggagaccggcgtccatatcaccttcatcaacctctccggcggcgtggggatcccctaccgtccggagcagcctgccaatgatatcgccgtcatcggcgagggagtccgccgggcctatgaggaggtgctggtgcccgccgggatgggtgacgtggccctgtataccgagctgggccgcttcatgaccggtccgtacgggcatctggtcacccgggccatccacgaaaagcacatctataaggagtacatcggcgtggatgcctgtgcctgcaacctgatgcgtccggccatgtacgggtcctaccaccatatcaccgtgatgggcaaggaggaccagctctgcgaccataagtatgacatcgccggcagcctctgcgagaacaatgacaagttcgccgtggaccggatgctgcccaagatcgacatgggggacctgctggtgatccacgacaccggcgcccacggcttctccatgggctacaactacaatggcaagctccgctccgccgagctgctgctgaaggaggacggctccgtggagctgatccgccgggcggagacgccggaggactatttccgcacattggtctggtgaggaaaccgcccagtcccgcagcaacggatcaaaatcaaaagcgccaccgcaggagcggtggcgctttttctgtttttgtcaggcggaggcacctgtctggtcttcagcagtgaagtagacgaagaaagtctcgccggtgctctcctccccggagtcatccacaaactgctccagataagcgatggagaagtccgtaaaaccggagggtacctcatagaccagttcgccgctgcgctcctcgtccacggccatgggatatgtaccgggcagctggttctcccccaccggctccacttccgtataggtctccatgtctgtggtgatgggataggcataggcgtcatcgccgtcgtcccactggacctggaaatcagtgtcatacatctcaatgctctgctcgaaggtgttctttacggtgatgtccgccaccagcagtacgttcccctccccaggggtacggcccgcgtagtcgctggtaaggtatgcgctgttgactgtgaaatcaaagaagtaggtctccatggtgtcgccggtgcggccctcgctggagccgcttccgccgcaggcggtcagccccagtgccatcaccacagccgccgccaatgcaaacagtctctgtttcatttcactctctcccttgccaaaaaatagatccgggcctccgccgcccccggcagaacgccccacgaccaatctcagtgtaccatggcgcccagccgggcgcaactgccgttcaaaaaaatttttctcagcgcgggggcttccctttgtgcacctttatcgggtggggatgatctcgatccagtatccgtcgggatctgtcacaaaatagatccccatggcaggattctcaaagcagatgcagcccatggcggcatgcttggcgtgggccgcctcatagtcctctgcccggagggccagatggaattcgcactcccccaggtcatacttctggggatggtcccgcagccatgtcagctccaggcggaagtccgtttttccatcccccaggtagacgatgatgaagctgccgtcggccgccgccttccgctcccccaccggctccaggcccagggcctccttgtagaacgcaagagatttgtccaaatccgctacattgaaattgaagtgattgaatgtcagcataagctcctcctgatcgccgggggccctctgcctccggcttggtttgggttcagtatagcatttctgccccctccggggcaaggccctttccaaaccctgcccgccgcttcttctttttatccatgttatacaatttccagagaaaaatttgtcggcttttggcttgttttatagttgcctcctaaagtgcacgatgataaacttctaattgttagacaatgctaacttttgaggaggaacgttccgatgacactggacaagctgcccctggggcaggaggccgtcatcacggctgtgggcggcgagggcgccctgcgctgccgcctgctggatatggggctgatcccgaagacccgcgtgcgggtggagaaggtcgcacccctgggcgacccgttggagctgcgggtgcgggggtactccctgtccctgcggaaggaggacgccgggaaaatcgaagtggaggtggccgggacatgattttcgcactggccggcaaccaaaactgcggcaagaccacgctgttcaaccagctcaccggctccaaccagcacgtgggcaatttccccggcgtgacggtggatcagaagtctggcgccatccggggggaaaaggactgcacggtggtcgacctgccgggcatctactccatccggccctatacgccggaggagattgtcacccgggatttcatcctgaaccaaaagcccgacggcctcattaatatcgtggacgccaccaatatcgagcggaacctgtacctgacgctccagctgatggagatgcgtattcccatggtactggccctaaacatgatggatgaggtcaccgccggcggcggcaccatcgacgtgaagggaatgtcccaggcattgggcatcccggtggtgcccatctccgctgtgaaaaaccagggcgtggacgagcttgtgaaggttgccgtccagactgcccggaccaagacgctgcctacggtgtacgacttctgctcccccggaccggtccaccggtgcatccacgcggtggtccaccagatcgaggatcacgcggaggctgcgggccttcccgtccgattcgccgccaccaagctcattgagggagacgaggacatcgtgacccgcctggccctggaccagaacgagctggagctcattgagcacagcgtcaaggagatggaggacgagtgcggcatggaccgcaatgccgcactggcggatatgcgctacaccttcatcgaaaccatctgctccggcacggtggtgaagtgccgggagtcccgggagcgggcccgcagcgaggccatcgatcgggtggtgaccaacaaatacctggccctgccactgttcttcgccatcatgctgggcatcttcttcctgacctttgaagtcatcggcgccttcctgtcggatctgctggccgcggggatcgatgccctcaccgcggcggtggacagcggcctcgccgcctatggattgaaccccgtggtccacagtctggtgatcgacggcgtgttcgcgggagtgggcagtgtactgagctttctgcccatcatcgtggtgctgttcttcttcctctccattttggaggacacgggctacatggcccgtgtggccttcgtcatggaccagctgctgcggaagatcggtctctccggccggagcattgtccccatgctggtgggcttcggttgctcagtgcccgccatcatgtccacccggacactggcctcggagcgggaccggcggatgaccatcctgctgacgcccttcatgagctgctctgccaagatccctatctacggcgtgttttccgccgcctttttcccgaatcatgccgccctggtgatgatcgggctgtacatcctgggtatcctggtgggcatcgtggcggccaaggtgctgggcaccacagtctacaagggcaaccccgtgcccttcgtcatggagctgcccaactaccgcttcccctccgccaaaagcgtgtggcagctgtgctgggacaaggccaaggattttctgacccgagccttcaccatcatcttcgtggccaccatcatcgtctggttcctccagacctttgacacccggctgaacctggtggatgacagcgccgacagtctgctggccaccgtgggtgcctggatcgccccgctcttcgctcctctgggctttgccgattggcgggtctccactgccctcatcaccgggttcatcgcaaaggagtccgtcatctccacccttggaatccttaccgggtccggcgcggatgtcagcaccgccgccctggggacgctgttcacccctgtcactgccgccgggttccttgccttcaccctgctgtacaccccctgcgtggccgctatctccgcagtgaagcgggagctgggctccggctggaaggccgccggtgtggcgttgagccagtgcgtgattgcctggatggtggccttcctggtctaccacatcgcggcgctgctgctgggatagaggaggctgccatgctggaagttttgatcctggcggccctgggcgtctggctggcgcttgccctccgttcctgcctccgccgcagaggaaagggctgcggcggctgtgatggctgctgtgaccgctgcggcggtgcctgccgcagcgcccgccgctgacataccccatattgtcggtaaaacggccccggcggaatgttccgccggggccttgctgaaaagaacccccgccggctgtctccggtgggggttcgcctcatgtgtccagcagcaccgtgccgtccggcaggataaaccggtctgtggagggggtgctcagatctgccgtcagggatgccatgcggtagatggtctccccctccaacagccgttccgacgctaccagtaagcctgtctccacgctgacccagtaccgttgggtgtaaccctccggatcctggaccgtctccacgtaaatgcagttcacatcggagacgctgcggtaatccgcggcggcgatatcctccaccggcaggtccaggatggtctcataggtggggatggcctgctcgtcatccggggtgatgtcccccgcaggggcgctgtaaacgctgctctcgctgccataccagatataagtgatctccccgtcggtgatggtgtggcgaacctgtccgtccgacagggagcggtctgtccgtgtccagcggccgctgaccgtgacggtggtctcaaaggaaccgctgccgccgtcccacagctgctccacccggatcacccggctgtactgccgcgggcgggtcagcgtctcaatggcggtctgcaccgtctccggcgtcaccgcgatcactgtcagggcgtcaccgccggaggcattggtatcctctgcctgtccgggggagctcccctcctccggcagcgtgatatgggaggagcggcgcagactgttgctgaacatcaggatcagaaccatcaccaccaggacaataaagcccgcggtgatccggttcagcttccgtttctccatctccgccctcctctctcagggtgccgtccgcggcaggtcagacgccgaattctgccggccgatcccgccgcaggccgaacttccactcgatggcatcggcaatccggcggcaggcatggccgtcaccgtaaggattcaccgcgtgggccatggcgtcgtaggcgctcttgtcccggatcagccgctccgccatggtgacgatgtcatcctgtaccacgccgcagagcttcacggtcccggcctctaccgcctccggccgctccgtctcccggcgcatcaccagcaccggcttgcccagggcaggggcctcctcctggagaccaccggagtctgtcagcaccagataagaccgggccataaggttatgcatctcgtccgccggcagcgggtcgatgagatggacccggggcgcgccccgaagataggtgtccactgcttcccgcaccaccgggctcaggtgcaccgggtacaccagctccacgtcccggttctcctcggcgatctgccgcagggccagcatgatgttcttcatcggctcgccataattctcccgccggtggcaggtaacaagaacgatcttcttctccccatagggcagctgattcagctcctctgtggaaaagcggtagtccggccggactgtggtcttcaaagcgtcgatgaccgtgttgccggtgacgaacagccccttggtaataccctcccgctccaggttggcccgattgttggcggtgggacagaaatacaggtccgcaatggcggacaccagcttccggttcatctcctctggaaagggagaatacttgtcataggttcgcaatcctgcctccacgtgcccaacggacacctgatggtaaaaggctgacagggcaccggcaaaggtggtggaggtgtccccgtgaaccaggatcatatccggcttcagggcgtcgatggcctcgtccatgccggtgaggcacttgctggtgatggtggacagcgtctgccggggggtcatgatgtccagatcccagtccggcttcacctgaaagacctccagcacgctgtccagcatctgccggtgctgggcggtgacgcagcagaggctctcgatcccctcccgattcgccagctcctgcaccagggggcacatcttgatggcctccggccgggtgccgaagacgctcatgatccgcagcttttccatttacttctcctccgtctttccatcatcctccggcttgtccgctggatgatggccgtggtggccgtgctccttcagctcctccaactcttcgtgcagctcctccttgacctccttggggaacaccacccgggcggccaccactgccacgatgcacagcaccaggaacagcagcatggcccggccctccccgctggtagtcagcaccacggcgctcaagcccaggatggcagagatcacgtacagagtagccaccgcctgcttctggttcaggcccatgtcgatgagccggtggtggatgtggctccggtcggcgtgcatggggctctggccgtgggcgatgcggcggatgaaggcaaaggcggtgtcaaagatgggcagtcccagaatcaggaatggcaccgcaaaggagatgatggcatagaacttgaacaggccctggatggacatggtggccaaaatgtagcccaggaaggtggcgccggtgtcgcccataaacatcttggcggggttcatgttgtagggcatgaagcccacgcaggcccccaccagggccgccatcaccacagccacctgaaactgcccgccaatgagggcgatcaccagcactgtggtggcggagatggcggagacgccgttggccaggccgtccaggccgtcgatcaggttcaccgcgttggtgatggcaacaatccaaagcaccgtcaggggcacggagagatttcccagcacccaatagggattgtccgaaaagacgttggggttggaaaacgcctggatcaccacgccgtgggtggcggggatcagggcggccacgatctgcaccacaaatttcagcagcgccggcagggccatgatgtcgtccaccacgcccagcaccacgatgataacggctcccagcaggatgctgcgcatctcggccgtgatctccacaaacagcaggatgctgaccatgaagccgataaagatggccagtccccccagccgggggatgggagtcttgtgcatccggcgggcgtccttgggtacgtcgatggcccccaccttgtaagcaaaagtcttgacgatgggcgtcatcagaaagctgacgaccagcgccaccagcagcgccagcagcgtataggcgatcagccggttttcgatcaacatgatgtctcctccatcaccggggcaggaagcccacctttttatagaccttgttcagggtccggttggctacataggccgccttctccgcaccggcgcggtagacgctctccagatagctcttgtccgccagcaggcgctccgtctcctcccggatgggccgcagcagctccaccacggactcacccaccgcctgcttgaagtcgccgtagccatggccggcgaactcctgctcgatggtctcaaagctcttgccggtggccacggcgtagatctgcatcaggttggacacaccgggcttgtcggccgggtcaaagcggacgcaggcctcggagtccgtcacggccttcttgaacttgcgcaggatgtcctccggcttttccagcatgtagacgcagccgttggggtccttgtcggatttgctcatcttcttttccgggctggtgaggctcatgaccctggcgcccacctgtgggatatagggatccggcagcttaaaggtatcaccgtagatcccgttgaaccgggtggcgatgtcccggcagatctccacgtgctgcttctggtcgccgcccaccggcaccaggtctgcctggtacagcaggatgtcggcggccatcagggccggataggtgaagaggccggcgttgatgttgtcggcgttcttggcggacttgtccttgaactgggtcatgcggctgagctcgccgaacatggtgtagcagtccagtacccagcccagctgggcgtgggcaggcacgtgggactggacgaacagcacgtttttctccgggtccaggccgctggcaatgtaggccgccacctgggtcagggtatgccgccgcagctcagcgggcacctgccgcactgtgatggtgtgcatgtctgccagcatgtagtagcagtcatattcgtcagccagagccgcccagttcttgatggcccccagataggaacccagggtcaggtcgccggagggctggatgccgctcaggattcgttttttctgtacttcgttttccattttgtatccacctcaaatactcaagctgccaggcatctctgccggatggcggccggttttccttatatcgagataactattatattataccatacaacattattctgtgcaatctttgattgcgctcccagacgttgcgtgttacaatacccccataaccgcagctgctctgcaaagaggagggatgggacgtgctccccaaaatcggaatcctgtgcgccggagatgacgagctcgcgccgttcctgcctcttctggacaggcgctccgtccgccggcaggccatgctcacgatccacgagggatggatctccagcgttcctgccgccgctctgtacagtggtgtctgcaaggtcaatgcggccatcgctgcccaggtcctcattgacagctgccgggtggaagccatcatcaatgcgggcacagcaggaggcatcgacccatccatctccatctttgataccgtcatcagcacagagaccgcctatcacgatgtagctgaggatattctcacggagttccatccctggatggactccatctggttcccggggaccccttcctgctctccttggccacccaggcggcccaggactccggccgccccgtccgcttcgggcggatggtgaccggagaagcctttctctctggccctgggacagaggccgtgcggtccgcatttcaccccctttgcgcggatatggaatccgcggccgttgcccatgtctgccatgcaaacggcatcccattcctctccattcgcaccatcaccgattcggccgaccgatccgccgccgcctgctttgaggaaaactgccgccgggcttctgaaatcgcagcccaggtgacccacgccctgttgaaacgcctggccgtcagcgagtcctacccgattgaaaaaggagaactgccatgacgcatttctgtacctgccaaaacaccgcctgccgctgccatccctccaaccatagccaggggtgcgatctgtgcattcagaaagagctgcgcaaaggcgagatccccagctgctttttcaatctggtgatccgacccggggagacagtggaggattgtaccatggcggccttcgcccgacgggtgctggagcgggaggcggagatggccgcctctgataaacagtagctgaccccggacagaaaaacggagggagcgcatcgcgctccctccgccttcttttcaaaaacagggtccggggcaggctcaggccttgtggtcgcagcccagcacgtccacgatcttgtgggacaccagctccttgatggcggcgcgggcgggcttcaggtactcgcggggatcgaacttgtcggggtgctccgccatgaacttgcggatggtgccggtcatggccagacgcaggtcggagtcaatgttgatcttgcacacggcgctacgggcagccttgcgcagctgttcctcgggaatgcccacggcatcaggcatcttaccgccgaattcgttgaccatacggacgaactcctggggcacggaagaggagccatgaagcacaatggggaatccgggcaggcgcttcacgacctcgtccaggatatcaaagcgcaggggaggcggaaccagctcgcccttctcgttgcgggtgcactgggcggcagtgaacttgtaagcgccgtggctggtgccgatggcgatagccagggagtcgcagccggtcttctccacgaactcctggacctcctcgggatgagtgtagtgggactcctcggcagagaccttcacgtcatcctcgatgccggccagagcgcccagctcggcctccacaaccacgccgtggtcgtgggcgtactcaaccaccttcttggtgatttcaatgttctcagcaaagggcttgctggaggcgtcgatcatgacggaggtaaagccgccgtcgatgcagctcttgcaggtctcaaagtcagggccgtggtccagatgcagggcgatggggatgttggggcactcgatgacggccgcctccaccagcttcaccagataggtgtggttggcgtaggcccgggcgcccttggacacctggagaatcaggggagcctccagatcccgggcggcctcggtgatgccctggacgatctccatattgttgacgttgaacgcgccgatggcatagccgccgtcgtaggcttttttgaacatttcggtcgtggtaaccagtgccataagatcaactcctgttcatttatttgtcccgctctcccacatcggccgacaggtccgatcccggttgtcaaaaaacgccgattcaaaagaacgaaaacgattttcccttatgataatatcacaagatttttaaaatgcaagtatttacaattctttttttgaatgatatgatgaaagaaagcatcccgaaaccaaatctgaggaggatttttccatgagtgaactgaaaggcgcctgcattttcggccagtccggcggccctacttccgtcatcaacgctagtgcctacggcgtcatcgccacggcattgaagaaccccagcatcacccgcgtcctgggcgcggagcacggcatcaagggcgttttgaacgaccggctgtttgatatgggccaggaggacccggcagagctggagctgctgaaatacaccccctcctctgccctgggctcctgccggtacaagatggcggacccggatgtggatgacaccgactacaagcggattctggagatcttcaagaagtatgacgtccgctacttcttctacaacggcggcaacgactctatggacacctgcaacaagatcagcaagtacatgcagaaggtcggctatgagtgccgcgtgatgggcgtgcccaagaccatcgacaacgacctgtttggaaccgaccactgccccggcttcgcctccgccgccaagtatattgccaccagctgcatggaggtctatcaggatgcccgagtgtatgacaccggcatggtctgcatcatcgagatcatgggccgccacgccggctggctggctggcgccgccgccctggccaccgcctacggcgccggccccgatctggtgtacctgcccgaggtggacttcgacatggatcagttcctggccgacgtggagcgcatctacaaggagaagggcaactgcatggtggccgtctccgagggcatccactacgccgacggctccttcgtctccgaggccaagacctctgccaccgacggcttcggccacgcccagctgggcggcctggcctccctgctggcccaggtagtcaaggagaagaccggcgccaaggtccggggcatcgagctctccctcctccagcggtgcggtgcccacctggcgtccgagaccgatatcgaggaggccgtcatgagcggcatggccgctgtggagaacgccgtcaatggtatcaccgacaagatggtgggcttcgagcgcagctatgaggacggccagtacgtctgcaagaccaagctgctgcccctgaccgatgtggccaacaccgagaagaaggtgcccatcgagtggatcaacgctgcccacaacggcgtggagaagcccttcatcgactatgtgctgcccctgatccagggcgagcccaagctgcccaaggaggactccctgccccgcttcgccaagctgaaaaaggtgctggtgaagtaagcggcagcgaaaccccagaacaggaaagagatcacccgctttgggtgatctctttttcttcagcaccgtgtctctcggtagacagagtacaagaaatgaagcatttctccgctgtaatatcgggtgagaaacgtatcttccttgcgcatgccgatgctctccgccaccctgattgacgcaaggttatccgatttgatgatggacgatacccggtcccgcttcagttgttcaaacgcatatcgtttacagccttcagctgcctctcttgcatacccgcagtgccagaactccttcttgagcagatatccgatttcaagcacgtctttatttcgatatggctgcatagtaaggcctgcctgcccaaccatgacaccactggttttcgatatgaccgcccacaggccaaatccatagtcccgatatcgtccgatctgccggtcaagccattgttggacatccgagttggaaaaatcatgttcataggcatacatcaccttcggattttgcagcatctccgccaaatcaagaaaatcatcctgattcatttctctgaaagccagacgttctgtctcgaaaaccacaggactgcttgcccccaatgtcattgttctcacttgttcttctgatagatcgcccacagcccgtccatcagcaggtacttgtcgtagacgatcttgttccggcagtatttcacgatcaccggggcattgccgccggtggccaccacgctgagtgtccgtcctgagaactgctcccggatgcggtcgatgacgccgtccagcatcccggcggtgccgtagacgatgccggagcgcatacagtcctccgtcgtcttgccaatcaacaccttggggtgctggagggagatggcgggcagctgggccgcccggcggctcagggcctccagggacacgttgacccccggcagcagcatcccgccctcgtaattccggccctcggagatgacgccgatggtggtggcggtgcccatgtcgatggtgacgataggaggctcgaatttctccagcgccgccaccgcgtcggccacgatgtccgcccctacctgggactggaccgccagccggatgttcagccccgtccgcacaccgggccccaccaccatgggcggcttgcccagcagccgggccagagccttctccatcatgaagttcagggggggaccacgctgcacaggatcgcccccgtcacatcctcaaaccggaagtgatacagggcgaacaggttcatcaggtcgatgctgatctggtctgcggtcttgcggctgtccgtgtccagggatgccagaaaccgcagctgcttgtccctgtcaaacagccccacagaggtgttggagtttcctacatcaatggccagcagcataagcctctctccttttttcttctgatcttgatcgtgttctatggtatcacgccttgccgccggatgcaaggccgggacagagggaaaatttttcgatgaaacgtccgaaaacgggaagaaatctgccgccggatctgctatacttttgttgaacacacgcgaaaggaggaggcgccatggattttccctatggtgaaacggagattgcctatctgcgtgccagagacctgaaactgggcgcggccatggaccggatcagccccatccatcgggaggtggacccggacctcttctcctccgtaatccatcacatcatcggccagcaggtatccatggctgcccagcggacagtgtggcagcggctccaggcagcggccgggacgcttgtgccggagacggtcgcggccatgccggccgaggcgctccaggccctgggcatgacccgccgccgggcgctgtacatcctggaatttgcccggaaagcggcctccggggattttgatctagacgccctggcggaaatggaggaccgtgaggtgctggcccgcctcacctccctgcggggtgtggggccttggacagcggagatgctgctgatcttcggcctccggcggccggatgtggtcagctggggcgacttggccatcctccgggggatgcggatgctgtaccgaaagcggtccatcgaccagaggaccttccagcgcctgcagaagcggtacagcccctacggcaccactgccagcctgtacctctgggccatcgcctgcggcgccctgccggagctgacggaccctggcgccggacggaaaccggacaaaaaacgggggcggcacacatgacagaccggcagcgctggcaggcggtcctggacaacgaccgccggtatgatggcacatttttctacggcgtagcctccacaggcatcttctgccgtccctcctgcccctcccgaccgccgcggcgggaccgggtgcggttcttccccacggcggacgctgcactggcggcggggttccgcccctgcaagcgctgccgcccggacctgaccgatttttccccgggccaagacgttgctgcggaggccatggcgctgctgcatcgccacttccgggatcaggcggacttgtcagccgcgctgaacggcctgggactctcccgccggaggttggccgatctgttccatgcagcctacggcaccaccctccacggctgcctgggaacgcttcgggtaaccgaagcctgccgcctgctgcgggagacggaccagcccgttgcccaaatagccggggaggccggatttgacagtctctccgccttttaccgggccttccggtccggcacaggacagtccccgctggcgtaccgccggagcgcccattccgcgccggacaaatcaagcggtccctgttgaacgacttacattcgtttgcaatcgctccatcactctgatcctgatttgaggtgtaattgtatgtggatgatctttcataagccctccccggtgggaatgctgaccctctcctcggacggcacagccctcacagggctgtggctggatgggcagaaatactttggtgctggactcccaaatgctgtaaaggaaaatgacctgccggtatttgagcaggtctccgcctggctggacgcctattttgccaaggctccccttccggctctgccgcctctggccccccagggcagccccttccgccaggcggtgtggcgcctgctgctggagatcccctacggcacggtcaccacatacggcgccctggcccggacgctccggggccaggggatttctgccgcggcccaggcagtgggcggcgccgtgggccacaaccccatctccattctgatcccctgtcaccgggttgtgggcagcgacggaagtctgacaggctacgccggaggcgtggccaacaagcagttcttgctggagctggagggcgtggacatgaccgggctgtatgtccccactcgtggcacggcgctgtgagacgcaggtggtctccatggcgcacacacgaaaaaagatgttttacgcgccgaaggcgttcaacggctatgggccgccggagcctccgattccggcagctcaggatcggcccgggcgctatccctgtccctgctgtgggcagatcaccctcccggtcccgccggaggaggcggtggcttacatctgcccggtatgctggtgggagaacgacgtgttcatttcctccgacaacgagcccagcgacgaaaatcatgggctgaccctgtcccaggggcgggaaaatgtccggcggttcggcacctgcgatccccggatgaagcggtgagggcatcggaggaaatttcttcttcagggatgcctttgggacatctgaacaggaatcccccaatccttgcgctgttcggcgtcttttggttccctttgtggtggtcggtctcacgtataccgggcgagtcggccttttcccagctccctccgggacaggctggaatagtaagaaagggcgccggattcctccggcgccctttctatgatgtctgcgtcacagaatgatgcagatgagtcccccgctgccctcattaatgatgcgggtcagggtctcctggagcttccgccgggcgtcctccggcatccgcttgagctttgcctgcagatcctcgttcaccagctcgtggaagctgcgtccgaagatgttggactgccagatcttgctggtatccccttcaaactcctgcagcaggtagttcaccatgtcctcggactgcttctcgttgcccacgatggggctgacggcagtctcgatgtccgcccggatcatgtggatgctgggggcgctggccttcagccgcacgccgtaccggccgccctgcttcatgatctccggctcctccagcttcagctcgtcgatgccggggaccacgatgccgtagcccgtctctcggacgtcgtggagggcgccggctaccttgtcgtactccgccttcaccgccgccagcttcgtcagcaggctcatcagatccccatcatcccccacctcaaagccggactgctccgacagggtcttgtagaacagctcccggggcaaggccagccgtgcggcggccacgccggtgcccaggtcgatggctgagattctggcctcactgatgtgctcgctctcccccagggcggcgatgacgccctccacctcccggatgtggcggagctgggcggtgttctgacggatggcgtcatacaggcccgctttgataggatggtccgccggcaaggcatccacccaggggggcaggaacaggtccagctcctgcatggggaactcgtagagcaccgccttcaggatggcggccacggcgtcctcgtccagctccaggcagttgacggccatgcagttcacctcataccgggaggagatgtccttggcgatggcttgggcccggtcgccccgggggtctgcggagttcagcaggacgatgaagggcttccccagctcctgcagctcccggatcacccgctcctccgcttccaggtagtcctcccgggggatgtcggagatggtgccgtcggtagtgatgacgatgccgatggtggagtgctcggcgatcaccttccgggtgccgatctccgccgcctcggtcatggggatctcatggtcgtaccagggggtggtgaccatccggggggtgtcgtcctccatctggccgatggcgcccttcaccatgtatcccacacagtcgatcagccgcacggaaaagctcgccccgtccggcagctggatctgggcagcctcctccgggacgaacttgggctcggcggtcatgatggtccggccagagccgctctgaggcagctcatcccgggcccgctccttgcggtagacgttgtcgatgttggggatcacctgggtctccatgaaccgcttgatgaaggtggacttcccggtgcgcacggggcccaccacgccgatgtagatatccccagcggtgcgggtggcgatattctgatagatactggtattcatagcatcccgtcctttttccgctccatagtcttgttccactctatgtccggctgctgcgaagtatgacagcccgtcttgttttggagaagatgcacaaattcaggagccggccttctccgttcttggctgattttgcggctttacacggataatttagtgtggtaaactgctaatgtaatgaaacggacggtatctccgtccagagatttggaggattgacgatgaaaaacatgaagaagctgtgggcagcgctgctggccctggccatgaccttctctctggccgcctgcggcggaacctctgacgaggacgccgccactgatgaccagcccacaggggaagaagtctccggtgacaccgctcccgagagcgacgtggcctatatccaggataagggcaccctggtggtgggcattacctactttgcccccatggactacaaggaagagggcagcgatgagtggatcggctttgacgccgacctggccaagctgtttgccgagagcctgggcgtctccgtggagttccaggagatcacctgggactacaaggtggaagagctggactcccgggccatcgactgcgtgtggaatggtatgactctcaccgacgacgttctggctgctatgggtacgtccaacccatactgcaccaactaccagactctggtctatcctgccgaccgggccgctgagttcgagggcctgacctctctggagggcctgaacatcgctgtggagtccggctccgccggtgaggatgccgccgtggccttgggtgccaccaccgtgccggtccaggcccagtccaacgccctgatggaggttgccgccggcacgtccgacgccgccgtcatcgacgtgctgatggccgctgagatgaccggcgagggcaccagctacgccgatctgatctacagcctgaacctgaatgaggcccaggacctgccctccgaggaatatggcgtgggcttccggcaggggtccgacttggtggacgccttcaacaccttcctggcggagaagacggctgacggcaccgtgctggaggtggctaccacctacggcctgcaggacgccgtgatcctggagtgagcttcttcccctgcggatcttccaaaagcagagtgcgcagtgcgcgctctgcttttcggcggctttccccctctaccacactgaccttgagaggacgataccatgattgaattttttacctccagcacattccggaccgtgctgtcggccctgaacagcggatttctcaagacccttcagctgtttttcatcaccctgatcggggcactgcccctgggcttggttatcagcttcggttccatgagccgctttcctcccctgcggtggctgacccgcctggtggtctgggtcatccggggcacgcctctggtgctgcaaatcattgcactgttctatgtgcccggcatccagaagtggttcaactggcccagcggtgagtccgggcggatgatggccgtgtgtgtggccttcatcattaattacgcctgctacttctccgagatctaccggggcggcatccagggagtgccgaagggccagcaggaggcaggccaggtcttgggcatgaccaaagcccagatcttccgccacatcaccctgctgcagatgatcaagcgaatcgtcccccccatctccaacgagatcatcacgttggtgaaggacacctccctggcccgggtcatcgcattgcaggaggtcatctggatgggcgagtcctttatgaagggcaactccggcattgcgggcctggtgtggcccctgttcttcaccgctgtctactatctgatcttcagcggcatcgtcacggtgctgctgggcaagcttgaaaaaaagctggacttctttcagtaaggagggaaccgatttatggcaattctggaagtacatcacattgaaaagcatttcggcgccacccgggtgctggaggacatcagctttgatctggagcagggccaggccctggccatcatcggctcctccggctccggcaaaaccaccctgctgcggtgcctgaatttcctggagaagccggagcagggtaccatctctgtggcgggtaatctgatttttgacgccgctgatcccgccacccagcgggagagcgaggtgcggaagaagcggctccacttcgggctggtgtttcagtccttcaatctgttcccccaatacacggcgctgaagaacgtcaccctggcccgggagctgctggcccaggagcagccggacttcaagcagaacaaaaagcaaatcctggaggagatccaagcggacggccgggagctgctggcgaagatgggcctcagtgagcgggcaaatcactaccccagccagctctccggcggacagcagcagcgggtggccatcgcccgggccctggccttgcacccggacatcctctgctttgacgagcccacctccgccctggacccggaactcaccggcgaggtgcttcgggtcattcgggagctggcggaacagcggaccaccatgattatcgtcacccatgagatggcctttgcccgggatgtggcagaccaggtgatcttcatggacggcggcgtcatcgtggagcagggtgacgcccaccaagtcattgagcaccccagggaggaacggacccgtcagttcctcgcccgatattccgagggataaaacggaacagaaaaagagcggagctgatgctccgctcttttgttatcttgtgccgtcttgttaagacggggcaacgggaaactccgtcaatcaggcaggtttggatctccggcggcccagcaatcgcccgatgagaaggcccaaggcagagatggccgccccgatgaaaaacaggtcccactgaggcaggttgatcttgtcaaaggccaacatattggcgagccggaaggtgagaaagtccgccagcatatacaaaagtcccagggccagaggcagcagccacatgcgcccatccctgcggaccagttccccaatccgcagggagatcacaaaggcggcgatgggcaggagcagccagtggaataaaagggcgtaccccatggcgtccgtggggtccatcaacaagaacaccaccagggcaaaaacccagagtcccaggtaaaccgctaccagccgcctcggggaccgccagctcctccccttggctccccgaacacgcaccgcaaagtccggcataggcacctccacttcccagagggcagacgaaacagaccgaatacccgttttttccagtctaccatgggctgccggacccgtcaagggtgactcaggtccgcttccgggggatcagcagcagctggtcccgggagatatctccttccgtctccagttgattggctgccaggatcacgccgatggtggtgttgtaccgtttcgccagatcccaggcggtctcctgcttccccaggcaacgcagcaccagggacggcgcgccggtggtctccttaggcgcgtctgtattgatctttcctgcggacacgcacacccgtttcacacgctgggccgcctccgcccggaagtccaccgggaaccggacctcgatgccccggtccgtcaggctgccctggacctcttccgggcagacggcccgggcagcgacccggcagtcctccggcagctccagttggcagctgacgtcgatgctccgctccgccaccagaggcacgcccccctcgtccagatacagtgcccggacagacgccccggtccgcaggaccacgcccgccccctcccggctgacggaaacagctccgcaggtgacggagagggccaggatggaatccgccaccacaccgatctccagcacctcccgcaccgtctgacggcgggtgaactgttctcgaaagctggtgagttccagaggcgcggcgtcataagtcagatcataggcagtggagtagaggtcactgaggagcgtcagttcctgggtctggcgcagcagagctgtggcgtggaggtacagcgtcaccgcgatctcccggccctcggcgtcggcgccgtcgacctgcagatccgcgccggtgaactggaggcgcaccgatggctccgcgccctccggggcgccttccacctccaggatctgagagaacggcagctctccggacgcggcgcagcagcggccgtccgccgtccggtacaggaggctgacggtgaagatacccttgaacagcagcttgctgcccacgatcttcgtctccgtcacagtgctgttcacccggctggtgaggatctccgccgctccctctctgcccggggacaggtccatctgttcggagaaggtgaagtccttctccgcaatgtgggtcaggacgatggcgtgctgctgctcctgctttttttcgatgcacagttccggccccgcctctgcatccgtgcagaagcataagggcctgcgctgatagcctgtcagccgcgtcaccagcttgcagtgggtgaagaccttgcgggggttcagcatccgggtctccagaagctccggctccgtgtccgccagcagcgccgcgcagtccggcagactgcgtccgtcggtctccaccgtgaagggcatggcaaattccagggtccggatgcccccctccccctccggcgtgtacagcaccgtcacccggacggtgccggagatctctgccctgccgtcccgcatctcccggctgtgcaggaacaccttgcccgtggtctcgatgatccgcgcaatgtccggacagtagtccggcacgatggtctccgctgtctcctcctgagtcaatgtcagctctcccgccgcctcataggcgtcgaagcaggcctttttcaattccagttccatggttcgcccttcctttccggccgttggtcctccgatggacggcgcagccgtttcccgccgcctggaaaacggtacggggcgggaggggccgccagcggccgctctcccgcccctgtgcgccgccatgttgtccacggagtctcgctctgctgacactgtatgcccggccgggactgcttattccgaaatcttgaacagcttccgcagaatgccgctgagggctttgggggacttccacactacaattcgcatgatatttgctcctttctaacgcctgcagcaggcgcagccgcacgcaatcagcaggaccgccaccaaaaacatcagcgcccctaccggaaagatcgccgcaatcaggatcccggcccccagcgccaccgcacagacgcccagtatccagcatccgccgcctctccgaaacatacgccccacgcccctttctcactcccattatatacgccgctgcctgtcctggtacaaaaggcagggcacacaaaaagaggcgggcagatgcccgcctcttccgcgcgattcacttcttccgctcctgccagtcctggaggggcttcagctcctcatacaggcgcacatagctggcgtggcggctccgttggatcttgccagcgcgcaccgcctccagcacggcgcagcccttctccttggtgtggctgcaccccacgaagcggcactggtccagataaggccggaactccacaaaggtctccggcaggcggtgcttcagctccagattcagctcatcggtctcaaaggaggagaagcccggggagtccacaacgtccgccccgcagctcaggtggaacagctccacgtgccgggtggtgtggcgtccccggcccagcgcctggctcacatcccccacctggagctgaaacgccggatccagggcattcaggatgctggactttcccacaccggaattccctgtaaaggcagacagcttcccggcgatcaggggcttcaattcctcgatcccctccccggtctccgcgctgacccgcagagttggaaatccggcggctgcgtaaatggcgtacagcgcatcggcacagtccagatcgcatttgttcagcagcaccatcacgctgcatcctttcagtgctgcgatggccgccacccggtcaatgaggaacgggtctgttttggggatggcaccggaggcgatgaccaccagctggtcgatgttggccaccgccggccgggaaaatgcgttcttccggggcaggatggcctccacaaagccctcgccgttccccagctcccggacctccacccggtcccccaccagaggggagatgccctccttccgaaacttgccccgggcccggcaggtgagcacctcgctgccggtgtccacatagtagaagccgctgagggcctttcggatccgtccctcactcaccgaaggtcacctcacgggtattgttcacatccatcacgccgtccacgtacacctccacggagaccgttccggtgccgtacagctcatagacatagttgccatctcggcaggggaccgactcgttgaccttgatcactccgtccaccacgatctgaacttctgctgtctcccggtctgtgggcagggcgataatcagcggttccatttgcaggtcttcattgccgccgctctccgggccggtgctgacccacagctccactgtgctgccggcaggcacctgcgtggtagccgtcgggttctgacggataaccagacccgcttccacagtgtcgttggcctcctcatggacctcgacctccaggcccagcacgttcttcagctggtcctccgcccaggcacgttccctattcgtgaaatcgatcagcggcacggtctggggtccccggctgaggacaaaggtgatggtgtcccccttgtggagttcttcattcgccgccggggtggtggacttgatgacgtcaacggccagctcgtcatcgtactccttctgggtctcctcatagggctggacgttcagttcatattccgccaccagatcctgcaggatggtcatggcctggtcataggtcatgggcttggtggtcaggtccggcatggtgcccacgtcctcaccggcgctgacccagacgttgatggtgatgggcagctcacccttcttctccgtgtccggctccgggtcctggcggacgatttcacccacggcggcgtcgctggcctcggtgcccgccaccaccacctggaaggtgccgtccgccacactggcctgctcgttggcctgctcctccgtcatgcccaccagcttgggtacggtgtaggtgtccggcgccgccgggacaaaggaggcgaagatggcccggaacaggaagaacaggaccaccacgaccactacggcaccgccgccgatcaacgcgatcttcttgccgccgctgaggcgggagggctgttcgtcctcgtagcgatcctcctcccaccggcgtccccgctcataggagggctcccggccctgccggtggagctggggcggcacagcggagcggagcttctgagtgggctcgtcggtctcctccggccgcaggtcggacagctcgaagtccagattcacgccggggttcttccgaaaggcctccagatctgcgatcatcgcgtctgcggaggggtagcgcttctccagatccggtgccatggccttcatgcagatcagctccagctgctcggggatgtccggattcacctcccggggagccaggggcacggagctcaggtgctggatggccacggatacggcgctgtccccctcaaagggcaggcggccggtgagcatctcatacagcaccacgccggcggaatagatgtcgctgcgggcgtcggtgcggtccccgcgggcctgctccggagagatgtagtggacggagcccagagcctcctgggtcagggtctgggcggcgttctccaggcaggcgatgccgaagtcggctaccttcacgctgccgtcccgcagcaccatcacgttctggggcttgatatcccggtggacgatgccccggctgtgggcgtggctgaggccccgcatgatctgtgtaatgaagtgcagcgactcccgccagttcagctgcccccgcttctccatgtactgcttcagcgtgatgccgtcgatcagctccatgacgatatactcgatatcgccgcccttggacacgtcgtacaccgatacgatgttggggtgagacagttgggcgactgcctgggattctgcgttgaaccggcggcggaagtcctcgtcctgggccaggtcgctcttgagaatcttgacggccaccaggcggttcagccggtggcacttggccttgtacacaatcgccatgcccccggtgccgatacgctccagaatctcatagcggttgtccagcatttttccaatatacgggtccttgtgttccatgtgtctccccctttactgtttttgcatcaggacggccgtgacattgtccggcgcgccctggcgcttggcgatggcgagcagccggtccaggcaggtgtccggcccgtcccgtggatgacctcgaagagcatctcctgatcggtgacggtgttcaccagtccgtcggaacacagtagcaggtactccccggcgttcatcgggcatatgtacccgtcacagtcggcggagatgtccggtcccagggcccgggtgatgagattgcggctggggtggcggcgggcctcctcagcggtgatgtctccccggtctaccatgctttccaccagggagtggtccttggtgatgcgggtgatgccgtcctccgtgatgtgataagcccggctgtcccccacgttggtgaccaccacgccgccgtcataggagatggcggacaccagggtagtgcccatgttccggcattcctcccggcgctctgcctccgcctgaatggcctgattggccagggctgccgcctgggcggatgcctccagcagctgctgaggggtctgatccgccgtcaggagcttctccagctcctccagatagacggagacggcgatctggctggccacacggcccccggcggggccgcccatgccgtcgcacaccacgcccaccgtgcggccggaggccgtgtgctgcgccgtgacgtaggcgtcctggttctccttccggacaaggccgatgtcggtcatgccccagacgttcatttggttcattgggaacactcccctttctgcgcttcttccatggccttccggcggagctgtccgcaggaggcgtcgatatctccacccaggctccgccgcacggtggcggtgatgccgtgggattccagccgtttttgaaaggccccgatccggcgggagggcttgtaggggctctccaccacgtcgttcaggggaatcaggttcacgtggcccggcatcccccggagcttcctggcgatcaggtccgcctgccagtcgtggtcgttgaccccgtcgatcatggcgtactcaaaggagatgcggcggccggtcttgtcgaagtagtcgtggcaggcccggaacagctcctccacgtcataggcccggttgatgggcatgatcttggatcgggtctcgctgtccggcgcatggagggacacagagagagtcagctgaagttcaagctccgccagccgccggatgcccggcacgatgccgcaggtggagagggagatatgccgcatcccgatgttcatcccgtcggggtggttcaccagctccaggaatttcagcaccgtgtccaggttgtccagcggctcgccgatacccatcagcacgatgttggagacgggcaggccggagtctttttgggtgaacagcacctggtccagcatctccgccggggtcaggtcccggaccttgccggcgatggtggaggcacagaaggcgcaccccatccggcaccccacctgggaggagatgcacacggtgttgccgtggtggtactgcatgagcactgtctcgatgcagttgccgtcggacagctcccagaggtatttgatggtcccgtccaaccgggacacctgcttgcgggccacctgggggcggtgatgaaacaggtctccttcagcttttcccgcagggacttggagagattggtcatcccatcgaagtccgtcaccccccggtggagccaggtgaacacctgcctgccccggaaggccggctcccccagggactggaggaaggccgtcatctccggcagggtcagtgatttcaaatcggtcatggatcgttcctcaattccgcgtcatgcggcagatgtaaaagccgtcggtgccgtggcggtggggccacagagtcacctggccctcggtctcccccaccggtccggacagggagaagggcgtgcggcaaaagtccgggtgctctgccaggaagctgtcggatacaccctcgttctcctccggcaggatcgtgcaggtggagtacaccagcgtgccgccgggcctcacgtaccgggcggcgttgtccaagatcgcccgctggatcaccggcagggcgaacaggtcgtcaggctttttgtaccggacatccggcttcttccggatgatgccgaaacccgagcagggggcgtctaccagcaccacatcgaaccgcgcctcccactccggccggaatgtccggccgtcggcggcttctgcccggatgcaggcgagtcccagccggtccgctccctcccggatgcgcttcagcttgttctcgtgaaggtcgcaggccaaaatctccccctggtcctccatcgcgaaggcggcggagaaagacttgcctcccggtgcggcgcacacgtccagcacccgcattcccggccccaccccggcgatttgggataccaaccgagccgccgggtcctggaccaggaattttcccgttcggaagggctccagcgccgtcaggtccccggcgtggtccagctctaggcatccggacacccaaggatggggccggacaatcacgccggatgccaccagctccgccgtcagctcctccgcagcagctttcagcggattcacctgaatcgtcagcggcgccggagcgttgtcggccgcaaggcaggcttccgtctccggccccagaatggcctggaggcgtttcaccagccacttgggatggctgtaccggatggagaggctgtgcagtgcatcctggtccgggatcctcggcaggtgcaccttgttccgggagagctgccgcagcaccgcgttcaccagtccggctgccttggcccggccgttgtccttggcctgctccaccgcctgattgacagcggcgctgtggggaattttatccagaaacagaatttgataagccccaatccgcagaatttccagcaacggcggctgcaagtggtcggccttttgggagcagtaggcacccaggtagaagtccagcagcagccggttctgcatcacgccgtagacgatgcggctgcacagcgccgcctctggtccggacaggccgtcccggcggagctggaccctcagggccgcatccgcccaggccccggccgtgcggcagctcaccaggacgcgcagggcggtgtcccgggcattaggggccctcattggctgcctccctgatcgcggccgccgcggccgataaagatcagcacaaaccgcatcagctgcagcaggctcatcagcagcgccgccacataggtcaacgccgcggcccgcagcacctttttggcgccgggcagctcatcctcatccagcaggcctgccccgtcgatggtggcgatggcccgggcggaggcgttgaactccaccggcagcgtcaccagctggaacagcgtggtgaaggaaaacagcacgatgccgatgaagaacagagactggttgtacagcaccagccccaccagcaacaggatgaaggacaggctggaaccgatccgcgtggcggggatgatggccgtgcgcagccgcacaggcccgtagttttccgcgtactggacagcgtggcccgcctcgtgggccgccacgcccaccgccgcgatggtgggggcgtcgtagactgtctcagacaggtagatggtattgtcccgggggtcgtagtggtctgtcagatttccccggcagggccggacaggcacaccgaataccccgtgagcccgcagcaccgcttccgccgcctgggcaccggtgatgcggcgccggttgttcacggcattgtaccgccggaagctgccggacacctggaactgggcccacagggacagcagcagcactgggatcagcagcaggacgtacagattatttgcaagaaagtcgccataaccgtaatagatatgaccgtaatagggcataaaaacctcccgaattgtgaaactggcggagctcagacctccaacgggtggcccagcagataggacgccgcagccatgcgcttgccgccctccgcctggatctccgtgagatacaggctctctcccctgccgcaggccacctggatgccctgcttcccggcggagagcactgtaccgggcgccgcgccggtctgttcgccgggggcggtgcggtagaccttgaaccgctgccctgccagatcgcaggccgcgcagggccagggaatcagtccccggacctgacagtcgatctcccgggcggagcgggtccagtcgatgggggacatctcttttgtcagcatggaggcgtaggtctgacggctctcatcctggggtgtccgggcggctgtgccgtttccgatggccgccaccgcctcgctgagggcctctgcccccaggtccgccaggcgcaccgtcagggcctgggcgtcctcgtccgggccgatgggagtctccttctgcaggatcacgtcccctgcgtccagctccttcgccatatacatgatggagacgccggtagtctcctccccgttcaggatggcccagttgatgggggccgcccccgatacttgggcagcagagacgagtggacgttgatagagccgtatctgggcacctccagaatgtcctccggcaggatgcggccgtaggccgccaccaccgtcagctccggtgccagggactgcaccagctccagcgccgtgccgtcccgcatcttcaaaggctgatagacgggaatattttctgtcaaagcaaattcctttacaggcgttggcaccagcttatgtccccggtttttgggcttgtccggctgcgtgaacacgccgcagacctcatggccgtcggccaccagccgccgcaaggacgccacggcgaagtccggcgtgcccatgaacaggatccgcatgggctcactccccttcctgagcttctgcggcctcacgggcctcccgctcttcctgctccagatagtcccgaagctcctcatcagagaggaagtggtcgatgtgctccacaaacagatggccgtccagatgctcgatctcgtggcagaaggctcgggccgtcaggccctcgccctccacctcgaaccagtcgccataccggtcctgggcccggacccggaccacgtccggccgggtgacgatgccccatttgccgggcacgctgaggcagccctccagcccggtctgctcgccgctctgagccacgatctccgggttcaccagttcgatatactcctcagagtcctcgtccagcaccacgcacacccggcgcagcactcccacctggggagcagccagcccagcgccattggcatcctccagtgtttccagcatatcgtccagcaactggtgcaggtgagggttgaactccgtcacagggcggcacacctttgtcaggcactcctctccctgcaccacgatcttccgtaaagccataagtccttgacctccttcaaaacgctgctcactccatggagttgcagtccacaaatagattcatcccgcggttggcgcggtcgtttgcaaatgccttcagcagccagctcaccgcctctcgggtgggcctgtcgttctttcccaccagcaggcagcggtagcggtagcggttattcagcttcatcaccggcgcaggggcgggacccagcacctccggttctccggccgccagctccggcagggcgcagaggcggcgcagctcttcccgcactgcgacggcggcccggaggacggcgccctcctcggtaccggagacggtgaaggtgaagaggtctgcaaatggcggaaaccgccgcaatcgccgcatccggatctcccgctcataaaacccctggtaatcctgccgagccgcgcactggatcacatcgttttccggggtgtaggtctggatcaccgcccggccggcactgccgccccggcccgcccggcccaccacctgggtcagcaggctgaaggtccgctcggcggcccggtagttgtctacatacagggacagatccgcagccagaacccccaccagtgtcacctggggaaagtccagccccttggccaccatctgggtgcccaggaggatgggaatctgctcccgctcaaacttgtccagcagctgctcatgacggcccgcggcggtgtctgcgtccatccgcagcacctccgtacccgggaacagatcgtggagctcctcctccaccttctgagtgccggtgcccacgtgcttcatgatgccgccgcagacggggcaggtgtcgctggatcgctccgagtggccgcagtagtggcacatcagccgtccattggcggagtgatacgtcagcgccacgctgcagcggggacactccggcacatggccgcactccccgcacagcagatacctgttgctgccccggcggttcagcagcaggatgctctgctctccccgccgcaagttttcctccagctcagtgcggaggacctgccccaccatcccggcgttgcccgcccggatttcctgtttcaggtccgccaccagcacctccggcaatgcctgccggttatatcgccggcgcagcagcgccttgtgatagatcccatgctccgcgttccaggcggtctccaccgccggagtggcagaccccaggaccaaggtggacttgtcccgggcgcagaggtatttggccacgtcccgggtgtgataccggggcgggttttccgactgatagctgctctcctgctcctcgtccaggacgatcaggcccacgtttttcagcggggcgaagatggcggaccgggtgcccagcaccacctggacctcgccccggcggatacgcttccactggtcgtagcgctccgtcatccgcagggagctgtggagcatggccacctggtccccaaaacaggcggagaaccgccgcatcatctggggcgtcagcacgatctccggcaccaggaccatggcccgcctcccccggctcagtatttcctgaaccagacggagatagacctgggtcttgccgctgccggtgacgccctggagcagcaccgcctccggcttcccggtcttcgtcagggtccggatacactgaaaggccgcctcctgttcctcattgaggacgataggaccgctgggttccaccgccgtcaggtccggcagccgcagctcctcttccgctgaaaaagccacgatccccgccttctccatcccccggagggcggccatggagacgcctgtgaagtagcatacctccgccgcgctcatccgcccctctgccgccaggagacgcaccgcctcccgccgctgggggaggatcgcttttccgtcagagatgcggcctcctcggcgctgacggccagttccaccatccgacgggacttgtcgccgatcctccggcgggccgcagtctcgcagaccgtgaccccggccttctgcagtgcccgcagcacagtgccagcctccttgccgcaggcctcctccagcactgacagctctgcggagcctccggcggcaaacaaggcgtccagcaccggggcggcccgtcggatgccggtggccgcgccgtcggccgcgcagcggtccatgccctctgccacatgccagacctcccggatctggtaccagagtccggcgggcaggatggccttcaccgcttcaaacagcgtgcagaagtaccgctgccgcagccacaatgccagggcgatgccatcgccgtccagtaccggccctcggtccaggaccgacagcaggggtttgagcccctgcatcttttcacctggcgtccgggccagaataatgccctcactggtgcggttgccccggccgaagggcacggtgacccggacgccgggtaccgccgtttccagcagctccgggggaaccaagtagtcatagggcttgtcaatggaatagggcgcggcgctcaccgcgattttcacgatctcagcggtttccatgcctcgcccctcctgttgttactgtgcctcttcctccgccggctgtagatcctccggttcctcaatggtcaggtccatgtttctggcgtccagcttgccgtccgccacttcctggatggccagggtgacgggcttctccgtcagatgctcgccagtctcctccgcctcgtcggcgatctgccgggcccggcgggccaccacgtccaccagcatatagcggttggggatatagccggtcagcttgttcattgcgggatacagcatcataatggatcaacttcctatctgccttgcaggcgtaaatttatttatggacaaagcgggcgtctcagcgtccgctgatgatctccatgcgctcctggggcttgcagtgctccgccgtgataatggcgttcagctcccccaccgcattctccacggtgtcgttgatgacaaagtaatcataggtgtgggccgtctgaaactccactttggcccgcagcagccgcttctggatcttctcggggctgtcggtgccccgctctgtcaggcggcgctccagctccgcccagctgggaggggcgatgaagatgcgcaccgtgtccggccgcttgctgcacacctggatggcgccctggatctcaatatccaggatcacgtccttcccggcctccatggcatcgtccacaaacttcttgggtgtgccgtagaagttccccacatactccgcgtactccaggaattggtccatggcgatccacttccggaaggactccacgtccatgaagtggtagtggatgccgtccagctctccgggacgcgggtcccgcgtggtggccgacacagaaaaatacagattcttccgggactccagcagggccttgagcaccgtgctcttccccacgccggaggggccggagaccacaaaggtcctcccctttctcatatacacacgctcctattcttcgttctctctctcttccttcggtgcgaaccgctccggcggcagggccgacagtaccacgtggtcactgtccatgataaaaatggacgcggtcttgcggccgtaggtggcgtcgatcagcattccccgctcccgggactcctgcaccatgcgcttgatgggggccgagtccggccccaccacagccaccagccggtcagcggagaccagattgccgaatccgatgttgatgagcttcatcttccatcactccacattctggacctgctcccgcatcttctccacttccgccttcagccccaccactacattggcaatggccacatcgttgcacttggagccgatggtgttggactcccggttgacctcctggatcaggaagtccatcttccggcccatgggctcgtcgcttgccagcatggtacgcagctgggccacgtggctccgcaggcggacggtctcctcgtccacagccaccttgtccgcgtagatggcggcctccatcaggatccgctgctcgtcgacggtggtgctctgcagcacctcctccatccgggcggtgagcttggcgcggtactccgccaccgtctccggcgaccgcatctccacctgtccggtgtagcgctcaatggcgtccagccggttggagatgtcctccgccagcttctgcccctctacggcccgcatgtcattgtacgcggccagcgcctcgtccaagaccgcgcagaggtcggcgctgacggtctccaggtcctcatccgccttcgtgacggtaaggacgtccgggaaccgggccagcgtctccggcgcgggccgatagtccgctgtgccgcagacgtccgacagctcccccagggcggcggcatactgggccgccagctcccggttcaccgcaaccttgaccacatccgcggcagtggcgtccacggtgatgaacacgtccacctttccccgggacaccgcctgctggacgtgctttttcaccgcgtcctccgcaaaggcatacatccggggcatcttcacggtgcagtccagataccggttgttgacggagcggacctccaccgtgatgtcccgcttgtgcagctcctgtcttgcccggccgtagccggtcatgctcttaatcatgtgatccctacttcctctcttgtggtctctcagcagcagaaccaatagccgccgccattgcagagcgcccagagacagcacaggctcatacagggatttccgccgcaaaaggtgccgaaactcccgccgccggggcggtatgccgtgtcgtccgtgccctccatatactccagcgcctgccggtactcggcgttggtggggtccatctggcaggcggtccggtagtaccgcagcgcctcgtccagccagccccggcggtagcagaccgcccccttcaggaagttccactccgcattgtggtcgctgtaattggccagcagcgcctccgcccggctgatgttgccggtgttgatggcgatgcgggcctgctggagcacggagctctgaccgctgtaactctgggagcccccatatccgccgtagccctgatagccgccgtatccgccgtagccggaagcgccgtaagaggccccgccggagccactcccccgcttgccggaggcccgctccttggtgatctgctcgtaggcggcgttgatctctttcatcttctcctgcgccagatccgccagcggattgtcgtggtagttatccgggtggtacttccgggccagctcccgatatgcttttttgatctcctcgtcggaggcgttctccgacacacccagtatctgatagggatcgttcatgtggtctcctcagccttcttgtgtttctttctctgttccctggggggcattttgtggaaggtgccctccagcacggcccggcccacggcaaaaagcccggtgtacaccgtactctccagcagggggcgccagacgccgaagtcccacagctcaaaggccgtggcgatcatgtggatggagtggtccagcgttctggcaaaggcccggcggctctcctcgtcccatttgccgtcccgcaggccatagcgcagggccacgggattataattcccggagacggcgtctttttgcaggtcgtccgccgcgtcgatcagatacacccaccggcccaggtggtagagcatctgctccagcacccgccgccgcaccgggtcctccaccccggcagccgctgccgccagcagctgggcaaaggtatctgccgcctgatccatggagggacaacactccccctccaagcggctcagagccgccagctgttcccgcacccggccgtcaaaccccggccgggccgcggcagcctttcgatagccgccccgcagtgcggcggcggagacccggtagcccaaccccttccagaggccgtggtcctccacgccgtcccgcagctgccagtaggccagaatcacgctctcatccgccgccagctccagagccgcggttgcgggctggtacgcccggagccggacggggctggacacgcaccgcctccggcagggtgcagcttcttccggatccgacagcaggatggccagataggtgaagtcgtagttcaggatcatccgggccgccgggccgtaccgctcccccaaggtgtggcacagcccgcagtatgcccgccggaaccggtctgcctcctcctgaggcaggatctccagcgggggcgtacatagccgaacaccgcctcagaacacccggacgatgttgaaggtcaggccgcccctggcccgcagcctgcggtcatagaagatggcaaagacgatgcccgccgcgaatccggccgcagccaccgcgtactgcgccgccacgctgtccgtcagcagggacatgatgacataccccgccaggaagagcaccaccgggatcaggtacaccagtaccacgatccgcagcatattcttggtgctgctctccacaaccaccttctgtccgggccgggcgccgatggggttgctggcccgggcgtggaccgccgcgccggtgacgccgcagccggcgcactcctcgcagtcgtgtccgcaggcggatttccggggtacggaaatctccgcgtggtccgcatctaaaattcgttcaactgttgcgatctgcgtcatgttgtctcgtctcctgtatctggggtctctccggcgggcgtatcaggctccgccggctgatcggatgtctgttcagaaatggtgacacgcacctgatacgtcccgccggagacgcccacgtcgtgccccaccaccgtcacctccgcggggacagtgtaggtgcccacggcggagccgaagtccgccagatccaccgtcaccagaatgttgtccgaggtaatggcccccacatccccgctggtgccgaagatggacacggccagctgctctgtcagcaggtctacggtccggtcctccggcgcgttctccagaatgaagttggtggccgtcaccgtggtgcgctgcatatccttgaaggagatgcgcagcgtggcgcgtgtgacgccgctgagattctcgcatccctccgggatgggaatggcatagctgtaattggtggtgctgcccagctccgccagattgaaatcgtccagaacgatgctgtccatgctgttcagcacatctgccgggccggacaccaagatggtggacggctcgatcccccagtccacgttgtacatgcgggcgccggcggactccacgaagttcatggtcagctgcagctcccgggtgacatataccggcagcgtcacctgaatggtctcctctgtggtctggaggctggtgttctccagcagctggtcgtttgcgtcatagaactggatgggcagctctcccgtgaccgtggaggtggcgtcctctcccagatccagggtcaccttggcatagctgacggcatccacatcctcctgatcgccccggacctcgatctccgtggggctgacctgcagctctccggcggagtaaccctctgccacattgccggagatctcgcaccggacatccaccgtcttgtggtacagctccgccacgttgatggtgatgacggagggcgtccggtcgctcaccgtaatattctgccggaaatactcttccgtatagccgtaaatcaccgaggtcaccgtctgcacccctgtccggctcacgttggagagatccactgtcacccggatatagtctttgtccagcagagccaggtcaaacgcggtcccttccatctccaaatccacggtgctgacggtatcctcgtccagcagcatgaagccccgctctgtaaggaccgtctccccagtgtaggtgatgggcacatcccggaaccacttggtatgcatcaccgcaccgccgttgtttccgaagttgtccacgaagatccacaccacgatggccgccaggatgcacagggcgagatacaccgccttctgcttgggattacttttcatggttgtcgcctcccgtgcttccggcccgcagcagattcatcaggctgaacttgggcttgtcctccccggcctcctgcggaagcaactcgttccgcaggatattggccagcgtctccggcttgaggtgccgcttgagcattcccccgatggccacggagatggacccggtctcctcggagacgatgaccaccacggcgtcggcgttctcgctcatgccgataccggcccggtggcgcatccccagctcccgggagaggttcacgttcttgctgagaggcagcatgcatccggcgccaagcacccgcccgttccggacgatgacggcgccgtcatgcatgggagcctttacaaagaagatgtttttcagcaattcgctggagaccgccgcgtccagcaccgtgccgctgcggaccatgtcgtccagcaggttttcccgctcgaacacgatcagggcgccggtgcgggactgggacatctcggtgcaggccagcaccgtctggtcgatggcctgttccacggcggtgccggcctccgcccgggagaagaaggcgatgaagcggcggctgcccacctcctccaggatgcgtcggatctcgggctggaagaggacgatcagcgccaccacgccccacctcaccagctggttcatgataaagttgatgctgttcatattcaggaccatggacagcatcagcgccgccagaaacaccagcacgcccttgagcaggctggcggcccgggtgctctgaatcagcgtcagagccttgtaaaacacaaacaccataatcgctatatccaaaatgtccgtgaccttcagcatcatcagataccggccgatgatcccgggcagtgtggagagcgtgacaaattccattggacgtcatcatccctttcaggccatgaatatctagattatataaaatctgcctgtagaatgcaaggcaaaccaagctaaaattcacggtctgttcagaaagtcacctcaggatctcccccatagccactaggaaacgggatacttcctcccgcgtgttccagtgggaaaaactcagccggacggtgccggtgtccagcgtcccggcggtgcggtgggccaggggcgcgcagtgaaggcccgcccgcacggcgatgccccggtctgccagggccgcgcccaatgcctctgcgtccatgtgctccgggacaatggaaagcacccccgcctgggccgccaggtctggcagggcaaacacctgcagtccagggagccgcctcaggccctccgccgcctggaaggtcagctgccgctctccggcgcagatggcctccggccccagctggcggacgaatcggacccccgccagcagccctgcgatgccgggcatattgtgggtgcccgcctccagccgatccggcaggaagtccggcatctcctgctggatagagatgctgccggtgccgccctccagcagtgtgcggacggggacgtccttcccgcacagcagtacgccggttccctgggggccgtacaggcccttgtggcccggcatggcgatgaaggccgcccccagggccgtcatgtccagggtcagcatcccggcggactgggacgcgtcgatgatgaagggtacctcccgctcccggcagatagcggcgatagcctccaccggctggacgaagccgaatacgttggacacgtggttgcagatcaccgcgtccgtgccgggcacgatcaggcggtcaaaggccgccgtcaccgctgcaggctgaaacaggggcgccgccgccacggacacctgggcccccagggccgccaggggccgggtgacagcgttgtgctcatatccggagatcacggctttcccgccggggggcaccaggctcttgatggcaatgttcaggccgtgggtggcgttcatggtgaaggccacctgctccgggttctccagatggtacagctccgccagctctgtccggcagtcgaaggcagcctccgccgcacgcatggcggcggggtatccgccgcggccgggagagctcatggtggccatggcgttccgcatggcgtccgccacagtccggggcttctggaaggtggtggccgcgctgtcaaaatagatcacggtctcacctcccggaacgtcccccgctgagtcaagaatatctgaacagggtccaaagattccctgtgaagggccgtcagggcagccgtcaggtcggagtccgcgatctgcacggcgtaggcgcagccccggtccgtcaggtcccggggggcccggaagatccggcttcggatccccgaccgggccagcgcccgctgcatccgctgggcataggtcaccgagcgggcgataatcaaatagtgctccacagacactcctcctctctacccattctatggtcgggaggcgcggacgtgcgaaaaggacgcgcccgaggcacgtccttttttcaggggagccgttccagcagcgccaccgcatgggccgccatgccggagctgtccccagtaaagcccagatgctcctctgtggtggccttcacattcacccggtccgcatccgtcccaagagctgcggagaggttcgcctccatctccgggcggtaggggcccaccttgggggcctgggcgatgagggtggcgtcgatgttcaccacggcccatcctctctcctgcagcagcgctgccacctgccgcagcagctccaggctggaaataccggcgtagcggggatcgctgtccgggaacagcttgccgatgtcccccagcttggcggcgccgcagagggcgtccattaccgcgtgggtcagcacgtccgcgtcggagtggcccagcagcccacagtcccaggggatctccacgccccccagcaccagccgccgcctctccgtcagccggtggacgtcatatccatgtccgatccgcagattcgtcatatccgatcctccctggcctgcagaatagcctccgccaaaatcaggtctaccggagtggtgatcttcaggttttcctcgtccccctccaccagatagacccgcttgcccagccgctccacggcggagcagtcatccgttatggggatgccccctcaacagccgcctgaagcgcggctttcagcagcgcgctctcgaagatctggggtgtctgcacagcccgcagggccgcccggtccagcgtctccgccaccgtgccgtcgtcccggacggctttgatggtgtccttcaccgccaccgccggggccgccgccccgcagcgggcggcctgctccgccacatcgtcgatgagctccggcgtcaccaaggggcgggcgccgtcctgcaccgccagcagctccatgccctccccggcctccagtgctgccagaagcaccgagtgggcccggctctccccaccccggatcaccttggtgcatttggtgatgccgtaggtcctgcacagctgggagatctccagaaagtcctcctcccgggcggctaccacgatctcgtcgatccgccgggccatctgcagggccgtcagtgtccgggccagtacaggaatgccgtccaggggctgcagcagcttgttcaccccgcccatgcgggaagaactgcctgccgccgccaccagcgcggcgcagcaagggcgctgggcatcccggaattttttgaaaaatgccatgatccgacctccctggaaatttctcctgaaacagcagaatgttcgcggacatggtccgcgaacacgttatctctggatctccggtgtctggagcatggcctgctccacacgccgctccacctcttcatagccgctgtcctctgccagcaccagctccgacagcaggatctggcgggccgtatgaagcatcttccgctccccattggagaggccccgcttccgttcccggaacatcagccccttaatcacacgtgccacctcgtacagatccccgctcttcatccgcagcagattttcccggtaccgcttgttccagttgctgctctcctccaccgccaaagacgggatagcggcaatcagggcttccgcctccggccgctggatgaccgagcggactccaatcgtctggctgttggcggtggggatcttcaacagcagtccacccaccggcattttgaacacatagtagtcctgtgtactccccgcgaccttttcctgaacgatggcgtcgatcacgccggccccatgcattggatgaacgaccagatccccaacgctgaacatggtaaactccttcccatttccgccgggcggtgactggaacccgctctctctatttccacttttctgttttcataaatttcattataccggcttttcagcagctttacaagcttattttgaaatttttttactatcttttccagtgccttacactttccgcagagaatcatccacccgcggcaagggcatcagctcctccagacacaggtcccccctgtacaaaagagccggacggcagatatgccgcccggctccggaggattttgttatctcttgttggaacggcgccagatgtgcatcttctccgcctcggcgatcagctcctcgcggaactgaggatgggcgatggcaatcaggccctcggcccgctcccaagtggacttgcccttggcgttgaacttgccgtactccgtcactacatagtggaggttggtgcgggtggcggtgaccacggacccctccagcagcgtgggccggatacgggacttcagctggccgctttttttgtccatgtaggaggaggagcagcagatgaagctcttgccacccttggacaggtacgcgcccatgacgaagtcctgctggccgccggcaccggagatatggtgaattccagaggactcagaggacacctggccgtacaggtcgatatccacggcgccgttgatggagatgaagttgtcgatctgagacacccgggcaatgtcgttcacatagctgacgggagcagccatgcactcagggttgttgtcgatgaagtcatacagcttctgtgtgcccgccgcgaaggcataggtctgccggccccggtcaaagggcttgcgcaggcccgtgatgcgaccggctatggacatgtccacgaaggcgtccacgtacatctcggtgtgcacgcccaaatccttcaagtcgctctcggcgatcatcttgccgatggcgttgggcatagagccgatgcccaactgcaggcaggcaccgtcacagatctccggcaccaccagtttggccaccgccatgtccacctcactggcggctccgccgccgcccagttcatccaaagcagggttctctccctccacgatcatgtccacgtcgtcgatgtggatgcagttctcaaacccgcccaagcacacgggcatgttcttgttgacctccacgatgacggtcttggcgcactcgcacacagccttcaggtgggagccgccgggaccgaaattgaaccagccgtgctcgtccatgggggccacctggaacatggccacgtccaggctcttgatgcagttgcggtaataccccggcagctcagaataccgcaggggatgtaataggagaagccctcgctcacggccttgcgctcgatgccgcccatgtgccaggagttccagcagaaatgctccgccgcattgggcacatcgaaaatggcgggcttgtgggtcaggataccgccccggatcttcacgtcggtcagctcgcccatccgccgggccagcgccttatccaaggcatccgccgagcagacgctccagccgtaatccacccagtcgccggacttgacggccttgaccgcctcgtcggccgttgtcagcttctgtttgtacacttcctggtagctcatgttgatcttcctcctgtaattcccgtttgttgtatgatgtcatcggtgttgtcttacattgattgtcaagagtataacataccagcccttgaaaagcaatccataccgtgaaaaaaatcacaaaattttcaaaaaaaggcaggcccctcaccggagcctgtcttttttaggtctggaaatccgtgcggattactcctccacaggagcttcttcctcctcagccgcgggagtcagcagggcgcggatggacagggagatcttctgcttctcctcgtcgatggccgtgatcttggcgtccacaatctggccctcggagaggacatcctcaggcttgtcgatgcgccggtcagcaatctgggaaatatggatcaggccgtccacgccgggcacgacctcggcaaaggcgccgaaggtcatcagcttgacgatgcggacagaggccacgtcgcccacctggtacttgtccatgaacacctgccagggatcgatgctgtgatccttcacgcccagggagatcttcttcttctcgggatcgaaggagatgacgtacacgtccatggtatcgcccaccttgcagacctcggcgggggtcttgatccggctccagctgagctcggagatatgtaccatgccgtccacgccgccgatgtccacgaacacgccgtagctggtcatggacttgacggtgccggtgtagtgcttgcccacttcgatgttggcccacacctccgcctgggcggccttccgggcctcctcagtgacggagcggatggagcccaccacgcgccggcgggcgcggttgacctcggtgattcgcagctggaccttctgcttcaccatggcagacagatcggcgccgcggggctgaccgctctgagaggcggggacgaatacccgcacacccttgacggacaccacgatgccgcccttgttctcctcggtgacagtgccctccagaacggtcttctcctccacggcctgctcgatgttctcccagaccttggcagcgtccagacgcttcttggacagctctgcgtagccctccacgtcgttgacgcggaccacataggtctcgatctggtcgcccacgtggatgatgtcctccgccttgacattggggtcgtcgctcagctcgctgagcttgatgtaggccgcctgcttggcgcccacgtccacctgcacttcggtgggggtgatggcggtaacgatgccggtgacccggtcaccgttatttaaagttttaaaagactgattcagtaattcctcgaaggactcctctttgccctcggccgccttgatttcttcgctcatcgttgcatatacctccttaatgatgcccgcaggcgtggaggcaccagccgtaaggcccgcaacagtacaaccattgaaaaaatccggcgagagctcgtccgcgcgttcaatctggaccacgcgggggcatctcctcaggcaaatttccgtcagatgtttggtgttggcgcttttacggtctcccaccacgaccatcacgtctgctttgccggcgatttctgccgcctcagactgacgttcatgcgtagcattacatattgtatcaaagatttttacgtttgtacactgtttttttatgattttccaagaagtttcaaaaagttttcggatgcaggtggtctgcgctactacggtaacagggatttcccgacttttctcatccccgtccagccaggcctccacggcctccggcccgtcgaacaccaggggctggcggcaccagctggccacccccatcacctccgggtgcaggggttcgccgatgatcaccggacgacggccctccgcctccgcctgggccactaggcgctggatgcggatcacattgggacaggtggcattgacgcaccggacgccccgggcctccagatcgtccagcacggatttcaattctccatgggatcggatcaccaccgtgtcccccgccgccaggccagccgggtcctcggtcttccggacaccccggcgggccagatcctccaccacgtgggagttgtggatcaggtctcccagcatccagcatccgccggtctcctccccggtctttgccgccaactccaccgcccgcttcacgccgtagcagaatccggcgctcttggccaaaaggaccttcatcgcgcctccttccccagggcgtaggagcggcggagcacctcgtcggcgatggcctggacctcctccggtgaaggccgacggctggtggcctccggccggtatgcctggccgaagatgatgcgggtccggcgaaagaggcgtttgttcccctccacgtacaccggcacgaactgcgccccggaacggatgccgatgacggccacaccacccttggcgggcagagccccctcgtgttccacccgggttccctccgggaatatcagcaggttgtccccgctcttgatagccttcagggcggttttcaccgcctcgatgtccccctcgccccggtcaacagggaaggcgcccagcttccgcagtacccagtcaaagaccttgttgcagaacagctccttcttggccatgatgtggagccggtagttcaccggaaccttcagcgccaccagcaccgggtcccagttgctgttgtggttgggacacagcagggcgccgtgctccggcaggttctcccgcccgatgatggtgaccgggtgaagaatccccgccaccaagtttaccagatagtagatgcatacgaaaaatccattcaacggcctcttttcgctcatagtcccgtcctctcccggataatgtgcagcagcgcgtcttcgctctggacaaaatccagagccgtggtgtccagcagcaccgcgtcctccgcctgacgcaggggtgcggcgtcacggtgggtatcgttccagtcccgttcctgaatggcacggaggatagccgcataaggctccggcgtcccccgctcctccagctccagcatccggcggcgggcccgctcctccgcggaagcggtgagaaacaccttcacctccgcatccggcagcaccaccgtgccgatatcccggccgtccatcaccacgctgttctcccgggccagctggcgctgcatctccagcaggtacgcccgaacctccggataggcggataccagagaggcgtagcgggacacctccggcaggcggatctccgccgtcacatccattccattcagctccatgtgctgcaggccgtccgtcccataggtcaggcaaatctccaggtccggcagcaccgccaccacggcggagcggtcccggggatcgatccccttccgccacacggcatagccgatggtgcggtagatggcacctgtgtccacgtataaaaagttcagtctggcggccacgctcctggccagggtgctcttccccgcgccggagggcccgtcgatggccacgcgaatgttctcactcatgcgttctcttccccttgtctcagcgcctccgccgcagcctgtcccgccgcccggcctgtggcccaggcgatctgcaggttgaatccgccggtataggcgtccacatccatgatttctcccgaaaagtataatccctttacaagttttgattccattgtctttgggtcaatttcactgatctttatgccgccggaagtgacgatggcgtccgttaccgggcagggtccggcaatctccacagaaaaatgcttgaggccctggaccagttcccgcctctgctctcgcgtcaggtcatggaccttttgatggggcgggatgcccgaccgctccactgccaccggaatcagcttctggggcagcagatcgtccagcgcgttgcagaagtcgtggttggcgtacttctcaaagtcccgcagcagccgcttgtccagggcctgctcatccagggcgggcttcaagtcaatctccagccggtaggtctttttgccgaagtgccgcatgtgggcggaggccgacagcaccaggggcccgctgacaccgaagtgggtgaacagcatctccccgaagtccgtgtagatcttcttccggtcctcaaacaccgccagccccacattccgcaggctcaggccctggagctcccggcccaggccgtaatcccgcagcggcaccaaagagccctgaaggtccgtcaccgtatgccccgcttcccgggccattcggtgcccctctcctgtggagccggtggcggggtaactgacgccgccggtggcaaggactaccgccccggcagggtatgtccccgctctccccggacacctgtgacggcgccggaggtgatctccagctccgtcgcccggtcccgggccagagagaccttcagcgccttcagccgccgctccaaagcggcgctgacgtcaaaggcccggtcactgacgggaaacacccgattcccccgctcggtcttcagcggcacgccgatggacgcaaagaacgccatggtgtcccggccgtcgaaccgggaaaaggcgctgtacaaaaacttgccgttccggggcacgttggccagcaaggtctgtacatcggcgttgttggtgacgttgcaccggcccttgccggtgatgttcagcttctttcccagccgctcattgggctccagcagcgtcacccgtgcgccccgctccgccgcggagacagcggccatcatcccggcggctcccccgccgatcactaccagccccttactcatcgtccatcttcccgaacacgccgtaggcgttccagatgtcctccagctccgcaaaggtgcgggacacgtccgaccgcatccgggagcccacggcgatcagcagcgcgttgatgagggacagaggcgccaccatggagtccacaaaggagatcatctcactgggagccagcagagcagcctccgccatctggtagacgggggacagctcattgtctgtaatggccacgatggtagccccccggtcctgggcaaacttcactgtgttcatagtgaccttggagtaccgagggaagctgatggcgatcatcacatccccggggccgatccgcagcagctgctcgaagatctcccctgcggcgttggactgcaccagcgtcacgttctcggacagcaggtgcaggtagaagttcagataccccgccacaaaggaggaggtccgcacccccaggatgtacaggtgcccggcgcccaggatcaggtccaccaccttgttgaactcagtcctgtccgcctcttccgccaccatccgcagcttgtccatatcggactggatcacggcggacagcacatcctgtccgccgaacagattgtccgccgcctggatgcgctgggtggaagtgaggcggctgcggatcatctcctgcagtgcccgctgcatactgggatagccgtcgtaccccagctccgatgcgaagcgtaccactgtggactcgctgacgccggagagcttccccagcttgctggcagtcatgaaggcggccttgtcgtaattctgcaggatgtagtcggcaatccgcttctgtcccttggaaaaggtgggcatattgcgctcgatggtatgtaggatgctcttagccactgctgtttcctccgtcggccgcctgcagggggccgttcttgatcttgcccggcagctccgctggcccgccggacgttccgcggtctattgtagcacagttttttcaaaattcaaaccgctttgcgggatttttccgtctcgccgccggaatggaaaagacgccgccccattcagggcggcgccttccgcttttcagtcaggggtgactcccagcgccccagcctcgtcctgtgtcaaataccgccactttcccggcggcagatcgcccagctccagagctccctcccggacccggcgcagccgcttcaccgtcaggccgcactgggcacacatccggcggacctgccggttcttcccctcatgaatggtcactgccagcaccgcggttccgggagtttcccgcagcacctccacccgggcggggcggatgggctccccctccaggtcggtaacggctgccagccgggccgccgcgccggccaccggtccgaatacggagacgtgatacgtcttttccacctcgtgctttggatgcagcaggtgctgggcccaggcaccgtcgttggtcagcagcagcaggccctcggaatccaggtccagccgtcccacgggataaacccggctcccgcagtccgctaccagctccgccactgtccgccgcccccgctcgtccgagagggtagagacatagccccgcggcttgttcagcaggatgtacacggcctccgcccggggcgccaggggacggccgtccaccaggatctcgtcccgatccgggtctgcacgctggcccagatgggcggtctggccgttcaccgtcacccttccggcgatcaaatatgtctctgccgtccgccgggagcaaacccccgcggcggacagcagcttctgcagtcgttcttccatgttgtcctctctctatcccggcaacccctgcttcagaatgctcagggcgctctccatccggggcgccacgtcggcgccatacagcagcgccacccggcccacctcttttccattgaccgagaaaaccgcctccccggcccgccggccggcccggatgggggcccgcagagatccggccagctccacgtccagctccagggactccccctccgccagcggccaggcgaagctgtccgccgccaccaggggcaccgtggcgctcatgccgttttccacctggacccgctggattgtctggcccagagaggcccccagcttggcgggataggtggaaaaaccgtagtcatacagggccgcgtggtccgcccagtcgttgccgtcctggagagtcaccgccaccagccgctggccgtttcgctccacacagctcaccagcgtccggcctgccgccatggtatagccggtcttcaggccgatacacccctctatctggttcaacagcttgttgtggttggtcatggtccgcccgccaatggtgacgctgcgggtggaggccatccgtaccagagtctcattttccaccgccgcgcaggcaagacgcgccatgtcccgggccgtggagtaatggtcctcatggtccagcccgttagggttggcgaaggaggagtgctccatgccgatctcccgggccgttgcattcatgagctttgcaaagtcctcctggctgccgctgatgtgctcggcaatggccacggccgcatcgttgccggagcagagcaacagtccatacagcagtgtctccagcgtcagcttctcccccaccttcagatacatggaggagccctctgtatacgccgcctcccgggagactgtgaccacatcgttcaggtctccctcccggatagccaccagggccgtcagaatcttggtagtgctggcgatcagcattttcgcgtcggcgttctgctcatacaacacccggccgctgtccacgtccatcaaaatagcggaggaggcagacgtactgaccgcgtgcgtctgacaaggaaaaagactgaacagggccgccagagcgatccccaaagcggcaagccgccggagcagggtttgcaaatgccatcacctcatttgtttggtgatggtagtataccccgttcagacgggttctttttcttccttcttgtcgaaatatttttccactttgtccaccagatccggcatcatctccaccacccggtccagcgtggtcatgggcggcatcgccaccggcagcacccgggtcgttccctcccggatcaccaggaacgccacaggctcaatcttcacgcctgcgccgctgccgccgccgaagtccttgggctgggtcttaccgtagtcggcgccgccgcagccgaagcccatactgacccgggaaatggggatcagagtcacgccgtcaggcgtggtgatgggctgccccacgatggtgttggtgtccgccatctcccggatcttgtccatcgtggaacgcatcaaatcgctgaggggtctcttcttgtccattgtctcgtccatggatgccatcctttctcgtcacgcggcggggtgttctgccgccttgttgtctgctgctttggatgcgggcggcatccgccgccgcttcatgaaccgccggagccagccgatggccgggaccgccagctgcgttcccacggcgatcagcgtccccagccggatggagatgccaagctctccttccgcccgggtctcctgcgcgtcaaaatcaattccgagatgaatcccgggatcccggatcaccaccagcttctccagagccggcatcccggtccagaccagggcgtggagtccaccgtacaactctgcggctgccgccgggtcctccgccccgcccagggtggcggacaggcgcagcgggtctacgcggataccccgccgggtgcggcgcagagcctttttggcggcgggccacagcgtccttgcggcgtcctgaagatcttccagtttgggcttcgggattttttttgccgcctctgccaggtccttcggctcctttttaggctttcccgtttttttggtttcctgcggcgttttttttgtctctttggacggtaccagccggacccggaagggaccaatcgtcaaatccgccgcggcctgccccctgccgaagaccacatacagtcccagccgcagccgccacagaaaaatcgcaagtgccagcagcaccgccaacgtgatccaaagtcccagcaacgtccatcacccccctgaccgctctggcggagcggattctcaaggcgcctcttcctccatggcgccggccgtctccggcgtgtcggctccggtgatctctgccgtgtccgccgggtccatgatctgtccgtcctcgccgatccgcatctgtccctcgccgccaaggtccggcagctccggcaggtcatccaggctggtcagatggaaggcccggagaaactgtttggtggtccggtacaggcggggccttccgggtacctgcaggcggccgcactcctcgatgagcttccggtccagcagcaggccgatggtataggcgctgtccacaccccggatctgatccacataggcccgggtggtgggctggtagtaggcgatgatggtcagcacctccagcgccggctggctgagcttggcgggcttgcggatctcaaaggcttttcggatcacatccgcgtagtccggcgcggaacacagctgccaggtatcctccatgcgcagcagccggatgccccggcgctcgtaggcatagtagtccatcagcttctggagcacctgctccaccgtggggcggtccatctccagggccacgcagatccggtcggtctgcaccggctccccagaggcaaacaggataccctccactgccgattcgatctctttcatctccatcttggaacggtcctctctcacagtttcagatcctggggcaactcccgctcctgccggacagtgcagtccgtctcactccctgccagatgcaggatgtgggcccggcacagctccagcaccgccagaaaggtggccaccacctcgctgcggctgcggctgccccgaaacagcagcagaaaccgagtgacgccgtgagtccttagccggctcagaatctcccgggccttgctctccacgggatagggctcgtgctggacgatgctctggaaggcggagcggggcggcggcagggaccgctccgcccggccctggatctcggccatggccaagaccaggtccgccggtgtctggtcgtactcgtagatctttccccgcttcaccggctccggcggacgggtgaggatattccgtccgaattctcccatgggctccagccgggcggccatggacttcaccttggcgtagttctcgttgcgcttccgctcctccagagaggcgatcagggcatccatctcgctctgggcctcctcatcttcaatggagagaagcatccgggtcttgatgtacaccagttgggaggccatggtgacgaactcgctggccacctccagatccatctcctgccgccgggccagccacgccatgtactggtcgcagatcagggagatggagatgtcctggatctccattttgttcttgcccagcagatatagaatcaggtccagagggccctcaaagtcctgcatctcttcctcggatttgctgcggaccaccttttccagcttgaatacggggttttgcaaaccgttcacctcaaccaaaaatcagggacaacagggcactgtaaatgcccaggatgccccgggagatcaaactgctgccgatgcccacaaaggacaacaccaacagcacgacaatgccgtaccgctcataccgcatcagcgtgatgtactgccggtccggcagaaacgccgccagcaccttggacccatccagcggcgggatgggaatcaaattgaacaaccccagaccgatggacagaggcgccagcgtgtacaggcagaagctgaacaccacgtccatcgccgcagaataaggggcgtaaaggtaaatcaccttactgataagcattgccaaaaccgccagcacaaagttggagacgggtcccgccagggcggtcaatgccatgccctgcttgggctttcggaagtaccgggggtccaccggcaccggcttggcccagccgaatcctgccacgaacatcatcagcaggccgatccagtcgatgtgccgcagaggattcagactcaggcggtgcatggatttggccgtggggtccccaagagccagggccgccagaccgtggcaagtctcgtggactgtcaggcagagaaaaatcgcggccacccgcaacaccgcgtccagcagtgaagtcaggtccagcgcggaaagcaatccctgtaaatagtgcagcatattcgtctccctgtgatgataacccaaaagataggagtattataccagttttccccccgcaatacaaggaaaatcaccggaattcaaagggctttcaggcggaaacaagcggagcgggtgctttcgcacccgctcctgattcagctggcttaataatcagcccttcaccatggaggcgatctcctcagcgaagttctcctgcttcttctcgatgccctcgcccttctcaaagcggatggcgtccttgaaggtcacctttccgcctgcggccttggcggcggaggcgatatactgctccacgctcatggagttgtccttcacgaactcctgctgcagcaggcagttctcggagtagaacttgttcagcttgcccatgacgatcttctcccgcacggcctcgggcttggaggccatcttgggatcgttctccatctggaccatcatgatcttcttctcctcgtccaggacgtcctggcccacctgagacttgtcccagaagcgggggttcagagcggcaatctgcatggccacgtccttgccgatctcctccaccttctcagcgggcaggtcggactccaggttcaccagcacaccgatcttgccgccggcgtgcacatagggcacggagacgttctcggcgaagcgggcgaagcggcggaccttgatgttctcgccgatcaccagcaccatctcctgctgctgctgggtgacggtcaggtcggtgccgacgtacttgcactccatcagcgcgtccaggtcggcgggagcctccttggccacagtggcggccacgcccttgacgaagtccacgaacttctcgttcttgcccacgaagtcggtctcggcgttgacctcgaccaccacgcccacgccgtcgatgacggcggcataggccataccctcggcggcaatgcggccggccttcttggcggaggcggccatgcccttctcgcgcagccactccacggccttgtccatatcgccgtcggaggcggtcagcgccttcttgcaatccatcatgcccacgccggtcatctcgcgcaggttctttacatcagctgcggtaaaagccattttgaattcctccaaacagttttggtatatacgcgcaaatgcaggcgcagattactcagcgtcggcagcagcctcttcagaggcggcctcagcggtctgctcaccctgcttgccctccagcacggcgttggccatgatggaggagatcagcttgatggcgcggatggcgtcgtcgttgccggggatcacataatcgatctcatcgggatcgcagttggtatcggcgatggccaccacgggaatacccagcttgtgggcctcggcgatggcgttgcgctccttgcgggtgtccacgatgaacagggcgccgggcagcttcttcatttccttcacgccgcccaggtacttctccagcttggcgatctcgcccaggtgcttcatgacttccttcttgggcagcatgtcgaaggtgccgtcctcctgcatggtcttcagctggttcagccggtccacacgggtgcgcatggtcttgaagttggtcatcatgccgcccagccaccgggcattcacatagaactggccgcaacgggtggcctcctcgcggatggcctcctgcgcctgcttcttggtgcccacgaacagcagggactggccgctctcagacagctgacggacgaagctgtatgcctcctccagcttgcggacggtcttctgcaggtccacgatatagatgccgttgcgctccgtgtagatatagggagccatcttggggttccaacggcgggtctggtgaccgaagtggacgcccgcctccagcagggccttcatggatacgacgctagaatttgccatagttgtgtgttcctccaatttcaatttagttggtcctccggcggtttcatcccccctgccaacccggccgttttgggccccgggcacagacagaaagtcgacgcaccgtgcggaatgctgaaatatagtatcacaatccagtgtgcaatgcaagtattttttcccaaaagccgtgtaaaattcccggttttgtccgaatttgtccgagttccccagcagccccccatttgttgttgcgccgcgcctgtctgtctgctataatgaccaaaatcccattttcagtttatataaaaacgcggcagatcagaaaggagcacatggatggacactgaaaagcagaaatcatctccgggtggaacggttcccggtgaaaaggttccgccggtcctgatggcggaggatgtggcggcactggaggaactgtgcggagacgtctccggctacttttacaaaatgctggactacctagaccagcgggtccgggacggtgtgcgtcagggagagttcacggaggagcaggcccggggcgatctggatcttgccctgtggtacgcctatgcctgcaacaacatcgacgactatgactactattataaagctgcccagtggatgcccgcctcggaaccggcggcggaggcggccgggagcgggatctggtactatcgctacgcctgcgccctgatgtactgcggccgcttggaggaggcccggcattatgcggagaccggcgtgtccctggacccggagtatccctggggctggctggagaccgccaagctccgggctcacttcggcgatgcgtccggtgctctggaggcggtggaccgggggctggctctggtgcctggggactacgagttcaccaccctccgtcgggagatccaggagggccggactctggaggagatggagttccactggatcgatccggagtgcgacgcggttctgcaggccggcggagacgaaaacgaggcggaaaagcggctgtccatcgccgggatctgctgcgatccggagaacctcgccgccatcaagaccgccctctcccccacggagtgggaggcggacgccccctactgcactttccggctgccctatcagaacggcagcctgctggggcgtttcttcatgaacgaggcggcgctgtccaagtttcccctctcctgggtccgtgagtttgtgcgccggctgccggagctggaccgccggggccgaaccttcctggccgcccaggcggggctgggaacggagggactatccctggaatggttcgcggtccatccggaccggacgatgcgcctgtgttacatccgggggcaggaccagcagatggtcctgttcgacagggatttctccctttgcagcgaggaccggcagcccgccctgacccggccggagggcggcgccttcctggcctttgtcctactggaagcgcctgcctgggacccggaccagttccgccgggatctgcgggatctgtacggcatcccctgcctcacagaggcggaggaatctgaagacggcggcagcaccctgacctttgaggtcagtggaatgctggcggcggtctgcctatacccattccctgtgccccacggcgaggcggaggaaaacgccgcccacaactacctgtggccggaggcagcggaatctgctgcccgccaccggggccagctgttggtgaccgtcctgccccgggaggaatccgtccgagaggcggccatactccaggtgaagctggtgtgtgccgcctgccgccagcgcggaacgctgggtgtctacgccaacggcaccgtgtaccagccggagttctatcttaacgcgtctcaacccatggaggacggggagctgcccctgctggatctggtgtggatgggcctctaccgccgggaagagggcctgtgcggctacactgacggccttgcggccttcggcaaggaggagatagaggttctggacacccaggctgccccgggtgacctgcacagcttcctgttggatctggccagctatgtattggaggaggatgtcaccttccacgacggggagaccatcggctttaccgaggggcagtatctgcccatctcccgcagcgccggtgtctggcacgacggcatgacgctgaagatcagctatccggaggagccgtgaccgctccgccggcatacgcaaatgcccccgcggtgaaagccgcgggggcatttgtcagcaacgcttgcgccgcttccgctccaggcggggatcccgccgctgaaagggcttgtcgatgaggatgatgtcgtctccgatccgctggatgcactcccaggggatgtagaactcctcccccctgccgaacaggccgaaaaagcggcccgggccgtagacgatgatggctaccacctgcccctccggcacccgcacgtccaggtccgacacgtagcccaggcggcagccgtcgcagacgttgatgacctccttgcaccggaaatcccggatcctgcactgcaccgcgctcaccccctgccttgagactatgcagtggacggaatgtcccaacactgttttatgcagacgggcagaaagcgacaaaagcttccagtataggaaaaaagccctccggccatactgaactcatgaagtttcagggtttgagggggcacagccatgcagggcaaggtggagatcgcgggcgtcaacacggcaaagctgaaggtgttgaaaaacgaggagaccatggaactcctgcgccgcaccaaggccggggaccaggaggcccgccgggaactgatcgagggaaatctgcggctggtgctctccgtcatccagcgcttcgccggccggggcgagaacgccgacgacctgtttcaggtgggctgcgtggggctcatcaaggccatcgataactttgacatcaatcagccggtgcggttttccacctacggcgtgcccatgatcatcggcgagatccgccgatatctccgggacaacagcgccatccgggtgtcccgctccatgcgggacacggcctataaagtcctgcaggtccgggacaagtacctggcggaaaaccagcgggagcccacggtggaacagatcgcccaggagctgggcatcccccgggaggaagtggtcttcgccatggacgccatcgtggatcccgtgtcgctgtacgagccggtatactccgacggcggcgacgccatctgcgtcatggaccaggtcagcgacacccggaacaccgacgaggcctggacggaccgcatcgccctgaaagaggccatgaagcggctggatgaccgggagcggcgcatcctctccctgcggttctacgagggaaagacccagatggaggtcagcgcggaggtcggcatctcccaggctcaggtgagccggctggagaagggcgccatcaacaccatcaaaaaaaatatatgagcaggcggggccgggaaaccggccccgctgtctttacgtctcagaggcttctgttgtctccgtcggtgagagcccgttaaagaagctcccgccatccgacaaagtgaatgtcttggacaggcccgcggcgctctggccgccctctccgccgccggggccgcggccgcctgcgggagattccctaccgtcaggctccatttccccatccgggcgctcagggggatcgtccggaacttcactgccagcgttctccggcacctcgccctccggcgcctgccagggatccaagtccgcgggaggcgcctcaccgcccatgtgccgaccgccgccggggctgcccacgccgtcggacatggtgccggccagttgggtgtctccctgccacagggtgtagtcccctgccgtcaggtccggggaggacaccaccagacaggtgaagtcgtttgccggcgtccaggtgcccacagtctccccgtcggcgttttgcagggtataggtctggccgccgttctgccgggatgcaaaggagaacaccacatagttctgggccccgccgtcgatttggtcatacatattgccggaggccgctactgtgccgccgttgatggtgatgcccatggtggcgtcgatacccgcgtccccgctgtcggagcaggccgcggcggtgacggcgccgccgttgattaccagccagccgttggagtcgatgctgtcgccttcgccggtctcgccggcgacctgaatgttcacggaaccgccgttgacagtggtgacggatacattgtcctcattggtgttgatgccgtcattgccggaggtgatgttgatggtgccgccgttgatggtgaggtgcagctccgtgtccagcccctcattgtcggcggtgatgttcagcacaccagtgccggcctcacccccgtccacattcatggacatcttggagtaaaatgcgccgtcgtatttgtggagcttctcgctgtcctccacggtcattccgtcctcgctgagcaccacgctgtccgggtcgtagatccgggccacataggagccggtgacgttgttgatagtaccgtcagcaatcagcacgttggcaccggcggcggaggtgtccacggtctccgaggcggtgtcctcgtctgtgctgccgcactcatagacgttatagaaaatcaccgccggggccacagtgcaggtgatgtccacgccgttcaggatcagcgtcaccactgccgccgggtcgtcctccgcgtcctcccccaggtccacagcgatctgtcctgcggacagggtgccgctgagggcgtaggtgccgggttgtgtgatgtggaccaccgtgtgggcctccgcctcttcggcggtgtgttcgtcggcctccgtgccctcgccgtaggtgaagtcgcggccggattcatagcagacaatgtcatgggccgtgtggacggcggctgactcgtctgtggagaccgccttcccgtccacaataatgccgtcatccgagaggacgatggaaacagcgtccggaaattcctgcgcggccgtctcgcggccctgcgcgccgcagccagaaagcgcggccgcagccatcgccagccccagcaagagagaagcaattcgtttcattgcagcaaatcctttccgtcaagatggaggcagtctatcatggatttctgaatttccactgaaaaaaggaggaaaaaaattgaccttttcacaagttcggagtaagctgaaagcaagtcatcaaaaacgaggagaccgcacacatggactacaaaaagctcagagacacccggaacagctccaaccccttcgcccagcggctggggatctttgtggaggagatcggccccggctacgcccgggcggtaaaggacatcacggcggaggacgccaaccctgtgggggttgcccacgggggctgctacttctccctggcagacacggcctgcggctccgccatggcctcccacggatattatgccgtgacggtgaacgcctcctacaactttctccgcagcgccaagctgggggaccatctggtggcagaggcccgggagaccaagcccggccgaactctctgcttttacgaggtggagatccgggaccaggcggggacgctgctggggaacggatccttcaccttctacaagctggaccgggagatcccgctgtgagaagcgcatacaaaaagaccgcccttcggcggtctttttgtatgcttatttcttgaagctgtccttcaagctcacagatcggttgaacaccagatggccgggcttggagtccttgctgtccaggcagaagtagcccaggcgcatgaactggaagctggcgggagctgcggcatccgccagggaaggctccaccttgcagccggtgaggacctccagggagttggggttcaggcactccaggaagttcttgtcggccgcgtccgggtccgcgtcggtgaacaggttgtcgtacagccgcacctccgcgtcgatggcggtggcggcatccacccaatggatggtggcacccctcaccttccggccgtcagcggggtcgccgccccggctctccgggtcgtactccgccagcacctcggtgacgctgccgttctcgtccttcacgcagccggtgcagcggatgagataggcccctttcaggcggcactccggtccattggggtagagccgcttgtacttgggcaccggggtctccaggaaatcgtcggactcgatccagaggttgcgggagaaggcgatctcccgggtgccggcggcggggtccagggggttgttctccacggtaacagtctcacttttcccctccggatagttggtgatggtcagcctgatgggccggatcaccgccatggtccgctgggcggtctcgttcaggtcctcccgcaggcagtgctccaggaagccgtattccaccacgttggcagactttgccacaccgatgcgctcacagaagttccggatagaccggggcgtatagccccggcggcgcaggccgcagagcgtgggcatccggggatcgtcccagccggagaccctcccctcctccaccagcttgcggagcttgcgcttggagagcaccgtgtggtcgatgcccaggcgggcgaactcgatctgccggggatggctgggcaggtcacagtgctctaccacccagttgtatagggggcggtggttttcaaactccagggagcagagggagtgggtgatgccctccagcgcgtcctgaatggggtgggcgaagtcgtacatgggatagatgcaccacttgttcccctgtcggtgatggggcaggtagttgatccggtagagcaccgggtcccgcatattgaagttgccgctggccaggtcgatcttggcccgcagggtgtacttgccctccgggaactcgccgttcttcatccgctcgaacaggtccaggctctcctcgatgggccggtcccgccagggggagcgggccggagtggtggtatctccccggtactccttgaactgctccggcgtcagctcgcagacataagccaggcccttcttgatgaggcccaccgcctgacgataatcctcgtcaaagtaatccgagccgtagaagaaccggtcgccccagtcaaagcccagccagtgaatgtcctgctgaatggcgtctacgaattcctcgtcctccttggtggggttcgtgtcatccatccgcaggttgcacaggccgccgaacttctccgccgtgccgaagtcgatggtcagcgccttgcagtgcccgatgtgcaggtagccgttgggctccggcgggaaccgggtgtggacggtcatcccctcgaactggccgccggggccgatgtcctcctcgatgaaagcgtggataaagttccggctctccggcgcctcgtcctgcgtcagcttgatctcctctgccatgcgctgtcattcctccctctcgcgcagtgtatcgttggtatgcgtacacgttaggatatttattatacaaaatctgacggggaaatgcaatacgttgttttagacggccattggcggcatggggacagcaaaaacttgtctgtatgcgggaatatgtcaaaagcgatcacatattcacaaaacggagattgacctctcctcaatgcccaaaagcgggatgcgccggcaccgtatcattaagataaacctgccgctggcagcgcctttggcgaaccggcaggacagttgcgttctttcgccggatctggtacgatacgaaaaaaaggccggcgtctccggcggaaagagagcgtctgtatggaaccgggattcatcgatctgacggcggaaaacatcgccgatcagcacctgtgctgcatcatccgcagcaaaaagccccaccccggcgtggaggctaaacgccgatggctggtggaccgcctgccggaggggcacgtcttccggaaactggatgtcaaggaaaaggtctttatcgagtacgcccctttggagaccgcctgggtccctgtagagggggacaactatctgtacctctactgcctctgggtggccggtgcatacaagggcaaggggtacggccgggcgctgatggagcactgcctggcggacgcccgggaccggggaaaatccggcatctgcatgctgggggcggaaaaacagaaggcctggctctccgaccagtccttcgcccggaagtacggctttgagacggtggatgaaacgggctatggctacaccctgctggcccgatccttcgacggtaccctcccccgctttacggaccaagccagggcggggaccatcgaggaaaaggcgctgacgatttattacagtgaccagtgtccctatgcggtcaacagcctggagatcatccggcaggtgtgtggagaggccggggctccgtattctctggtgcctgtggacacattggagaaggccaaggcccttccctgcgtgttcaacaactacgccgtgttttacggcggtgccttccagacggtgaacctgctggacgccgcttctctacggcggctgctgaagcggtaaagctgcccttttccgccgccgcaaccgattgttgccggatagttggtggtcaaaggagttgaattctggtagcataaagtctgaaaggaggtgtgtccatgaccacgctgggtcagcggatcagggaacaccgccgacgggcaggcttgtcccaggaggctctggcccgccggatggatgtcagccgccaggcggttaccaaatgggagtccggccagagcgcccccagcacggagaacctcttccgcctggcggagctcttcggcaccacggtggacctgctgctcccatcagagggggcggacgctccggcggcagaggcacctccacccctgtggtcccggatccgctggcgtccccgggtcctggcggctctggcggtgactgcggggtatcttgtcttttacctgctgggccgcatcctctggtgccccctggaggacagctccctgctgggctggctgctgtgggagcggcccagcggcggggagagctatctctacggctggctcctcagcagcggtctcttctggtgggccatggccctctccgccctgacggcgctgctggggtggtaccggctctcctgcaccacctgcgcctattttctcatcggatttttgatggggctggttctggggccccacccgccgggagcggccatgggacacgggcactacggctgggccttctggggatgcatctatctgctgtccctccccatggggctgctggcggaacgggcgggacggaagggcgtgacgttcgcttcccgccggggacggctgctggcggcgggactggtcctgtgcccgctcctgtccgccgttctggcggcgttggcaaaagcgccctgaaatttgtaaaaagagtccggagagaatgcacaccctgcatcctctccggactcctttttacggccggactgcacgctattccagcaaccagtcctccaccacatcccgcgccgcgacgggcgtcacgctcccccgcatcagcttggacagcagcgacaggatcccagactgcgaggcggtgatccccgggatctccgtccgctccccgccgctctccacgcggatgccgtagcactcccagagggcgtcccactcctccaccagcagaaagtagtccaccggtacgccgcggcacggccttcttcctaccaggaaggcccgcacctcgatttcctccttctgtctgttgtcacacacgaacaaaaaaattgtagcactgccgtttgggggaatgctgtcgaaccctgtcgatggcccggcttcctcccgctttttactgagttttcaccattcgggaaaggaactcctcccggctgtataacaggttcaacgcctctaacatgccgttgggcgtcaggtgctccggcaggtccagctgcttcagcagcgcccggcgcttcgcggcgctgtcggttccgccggtgaggcccagggcgaacagatccgccttggtgatagggtctcccggacactccgtcgccccctcgtcggcgaaggtggcgcccgcccggcgcagggcctccagcagcacggcgggcctcataccctccacgcccagcttgccctctttgccgggggtccgcttgcggcgctccttgcctgggatgtccgggatatatgcctgcttcacccgatcctgtgggagggcacccttcagatagttccggatgacgaaccctgccccatcgctgtccgtcagcacgatgagccccctctgctccgccaggcggcggagaaaggccagcttctcccggtcgttgaacacggcgaagccgcccagtgtgatgatggtagcgtccaccacctgactgagggcgtttttgtcgtagcggccctctaccacaatgacctctcggatcgctttcttcatcgccgctgcgcccccagacgcaccagcagcagcttcagctcgcccacggcgtccacgcccttctcgctcttcatccgccggtccagcacctggcacatctgcaccgcgtcggcgcaccaggcggccgtggtctttttggcggcggagagcaggagtttggccggatagtcgctcttcatctcccacagctccatgagccagtacttgtccttgccgctgtcaatggccatccgggcggtatagatgcgccggagctggctgcccaaagccgccaggatcatgatgggctctgtctgcattttcagcagatcccccaggatgcgggccgccccgtcgtaattcccctggagcaccgcgtcggacaggcggaacacctccgccgacagcaccggatccgccacagcgtcgatgtccttctgggtgatggccctgcctttggcataggcgccgatctttgcgatctccggcaccagccccgtcatcagaccgccgcaggtgaagatcaggtactccgccgtctgacggtcgatctccttccccagggccttgaaccgccgggcgatccacaccaccaggtcgctgttgtccgccggacggaactccaccgcttccacgtggtcggtgacggccttgtacagcttcttcatggtgcggttgggcttgtattccaccgtgtcgtagaggaacaccacgcagcagtagggcggcacatcctccaaaaaggcgatcagcttttcccgctgctcctcgttcagcttgaacaggtcgaagtccgacaccacaatcagcgtccgctccgccatcatgggcatggcctccgccgtctctgccagggtctggaccgtcaggtccttcccctccagggtgtggtagttgaactcctcaaacccggcggggaccagcttcttccgcagctctttgagatagtactcccggagatacgtctcctccccgtagaagatgtaggcgttccccgccgttcccgcggccaggtcgtttttcagtttctgaaaggcctcgttggccttggatgtctttttcgcgtatgccatggtgtctcctcaattcacagatagatggacggtaccctgcttgtccgtccggtagatctccacgtctgccagcaccaggcggcggagggcgtcctccgtggggtggccgtagctgttgtcccccacgctgatgatgcccgtctccggcgtcagggcctccagcaactccttcgaggtggaggatttggagccgtggtggcctactaccagggcctcgatgtcgggcagatcatggtcggcgatcagctgccgctccgccgccatgttccggtccccggtaatcagcaggtcgtagtcgccataggtgcacaggacggccagcccctgttcgttgtcgccctccacgtcccccggcgggtagatggtgaggctgctctcccccagggtgtaaaccgtctccgcctccacgtattgaatgtccacgccgtggttccgggcggccagctccacccggaaccgcgcccctgcatcgtcggacacgtccggcaggagcagagtgtccacccgcgctcttgccagcagctccgccacgccggagatgtgatcgtagtcatagtgggtcagaatcagatagtccagcgtcccgcagcccatggtggccaggtgatccgccgcgatgccgccggcgtcgtaccagctgttgcggctgccgcagtccaccagggcaaatttcccgccggaggtcagcagcacgctctccccctgccccacgtccagcacataggcgtccaggccgccccgggtgtagtggggcgcgcccagccgcaccgtcaccgccagggataccgccgccagcacacccgccacggcatacttccgccgggccttgggccgcaggaaaaaggccgcggcgaagaggacatacagaaataccagccagtatttcagatacgggttggtgaagtacagggcgtggtgggggacagacgccagaaccccggatatccagaggatataccgggtcagcaaagccggcacgaagccgatcaccgtccccagaggcacccagaggaagctcgccaggactgccccaagccccagcgtgaacacaaggctggaggctgtcaggcacagcaggttgcttaccggagagatcagtaccagcgacccgaagtagacagcgcacaagggcaccgtgaatgccatggcccccacggtggccgacaggctggaaaccagcagtcggcagaccttcccactcggtctctcccccaacagcaggtcctggagcttcggcgtcagccagagaagccccgccatggctccgaaggacagctgcagactgatggaggccgccgcaaaggggttcgccagcaggatcaaaaacagggcggcggacagcgtggtgggcgggtcgctgtcccgctgaaacaggggtgccgccagcacgaacaccaccatgatgcaggcccggaccaccgagggactggccccggtcaacagcgtatagaacatcaggacgggcagcgccagcgccgccgccagacggtgccggtgccgtcctgtgagcagcagaatcagcgtcatcagaaagccgcagtgcaacccggacacggccaggatgtggctgagtcccgcctccgacaggtcggaccgggcttcttccgacaatccggacgtgtccccggtgaggatggcgctgaggaacgcggcctcatctccgtcaaacagcgccgtcacccggttctgcatggcccgggccgcatgggcgggccaccaccgtggcgagccggcggatccctcaccgtagacggcctcgtctccccgctggtaggccagcaggaacactccctgagcggtgaagttggtaatggtatcctcccgaagccgggcggaatcctgaaatttcacctgtgccgccaccgtctggcccggctccaggtccagcaggtccgccccgccgtagcagaccaccttgcccaggggaaccccctccagcttcactgtcaccttggcgccgtagtccgtggggacggcgtactccaaaagagtcatggaagcggtgccctcgctgccggacagggccgcaagaggcgcccgtacagcatagctgtacagccagttccaccccagggccagggccagccccgtgcccaccagcaacacccgcttccgccaaagtcccggcagcagcaaggcgaggcaggccgcggcaaagaaaactgccgccacgggcagaagaagcctctccggcagcagatactgggccagacagatccccagagcgaaggacacggtgaacgcggccagcttgcgcatggtctctcctcttttccatcctgccaaacagctcgtccagcggctgcccagaacagcgggcaggctgcaaaagagccgcaattttgctctctccgccggatccatgcataggccgccgggattcacggcacctgctccgttgccccgtgtcagccctttggccggacgcgctttctcccaatgattctgctttcccgcctcgccccagccgatcacagctgtttggaaaaatggggaaagagaaaccatttgggtacattataccgggaaccggcgggaaataccagccctttttccataaatcatgttccctgctcttgacggctctctccgcccggcgtaagatagcagtaatcagtggaaattcttccaccaaaaaagagaggagcgttgaccatgaaacgcattctgaccatactggccgcgaccttgttgctgactgcggcaatggccgggaccgcctccgcctcttcctacgactccgttgcggaggaattgtccgccatcggcgtgttccggggcaccgccggcggctttgagctggaccgcgcccctacccgttccgaggccgccatcatgctggtgcggctctacggcgccgaggacgaggccaaagccgcctatgaggcgggagagatctccatgcccttcaccgacgtgagcgaaaccgcggccccctccgtcgcctggctgtacagccaaggcatcaccaacggcacctccgccaccactttcggcgcatccagtccgtgcagcgcaaaaatgtattgcgccttcctgctgcgggcactaggctatgaggacggcgtggacttcctgtacgcagacacgctggacttcgccatgctccacggcctgttcaacctctccatgctggacgccgcccccttcctgcgggacgatctggctgccgtcacctaccaggccctgggcgctgatctcaaggacggcagcacctatctgctggccagcctggtggagagcggcgccattgacgccgaggccgcccggcccattaccgagaaaatcgaggcctaccgggccctgaccgccgccagccaggcctcctccaccggcatcgacgcggactataccatgaatatggggatggacattgccgttgacggctccgatgggaccgagaccatccacgaaaccatgtccgtggccgtctccggaaacggccgcatccagatgattctgaaagacccgctccagctggccatttccatgaacatgaacatggaatccaacacggcaggcgccggccccgatgtgaccatgcaggatcaagtctctgttcaggagtggatgcaggacggctgggtctatatccaggaggagatggacggaaccacagaccggtacaaatatccggttggcaacatggacgggttcgcggagttttaccaggagatgctgcagatcagcggccagatgaacagcatgatgctgcccatgatcgactccatcgacgtctcccgcacgggctcccgcaccgtatacaccatgaagatggatgacagcctgaacagccttctggaggatctgctgacggccttgcaggaagagcttgccgccatggagagcccggtggacctcaccgcagatctgcagagctgcacatacgtctacaccgtcggttccgacggagagctggagtcctgcaccgcggacttcgacctggatctggtgctgggcctgcctgtcacggagaccgaaaatgcgcagattactgccaagctccagatggatatgcagatggatgtcaacgccaccggcgatgatgtgcgcatctcttatcccagcttctccaactttgaggacctgaccccggtcctctccggcggtgagctgtaacccccccttctaattcagtaagagagcgccgcgagcaaagctcgcggcgctctcttatgctccaacggacggcaaatcaggaaattgaaatcattttgcctcagcggtacagccgcccctctcgaaggccgcatcagcccggaggccacgtcatatctctgccgctcagtacgtggaagtgcagatgaaacacgctctgccccgcctgcattccccacctggccaagcccggtgggggccccggataaaacttgagcgggcaggcaaagcccgcccgctccaaggttttgcttcgcaaaacgcttgcacgcgctctcgcgtgcggccccgccggggccgtggctcccaggcatcagcccggaggccacgtcatatctctgccgctcagtacatggaagtgcagatgaaacacgctctgtcccgcctgctcgccgatgttggagaccacccggtagctgtccagccccttttcctttgtcagcttggcaatgacctcgaagatatgagccaccactgtgctgttgtccgcggtgatctcagacacagagccaatgtgggccttgggtaccaccaggaagtgggtgggcgcctggggatcaatgtcattgaaggcgtagcacacgtcgtcctcgtagaccttgctgctggggatctccccggcaacgatcttgcagaataggcaatcggacattttcaaacctcctttgatgtgatcggtataaactgatgataaacgggatcgtagcgatagtcaacccccgccagcgtctcccgcagggactgctcgtccgcatccagggacgcgcacagatcctccaggtccgcatactggtcccggaggcgggcgttgaggaagctcagaagaatgtaggggtccttgggcagcagcatggcagccccctttctctgtaaagggaaaatacttgcgatattctgaaagtaaataattttaccgcacgggtgtgtagttgacggatgcttcctcctctgtggtctccagcttgaagatcacggggcggagcccatcgttgcaggagcagatggccacgccgggcctgcggatccagtcgccgtaatagaacagaccctctcccgccccgtgggccagggcgaacacatactgatagatagccttccaggcctcgtcacagaggccatccggcttggcgtagtcggcgtagaacacctggccttcccgcagcatggggcaggggcccagcccttcagcgccgtattccgccgccagctcttcatccagggtggttttcaagacggtgatcttgacttttttcatggatcgtcctcctggtaaagatcaaatgtgataggtggaaattcaaacaggggcttttccttcctctgcatcccccgcttgggcttctctaaccccagtgtgtcataatatgcgtcggagaaattcaggaccgacgggtcaaagcccgtctggagctccttcacccgctggaatgggtcccgggaccggatgtggaatgtctccgccaacaggtccagggatgcgtcccggctcttgaagtcctcctcgcagcccggccaggtgttggcatcgttgtcctccagaagcttccggaaccgggtcgcgtccagcatgaagatctgcgccagaggactggtacatttgcagtagaacagatgggaaaggaactcccggaagtccgcccccaccggcagcacaaaggtgccctcttctgccagctccggctccacgcagtacaccgcctcatcccccggcaggaggacgaagtgcgtcccgcaactgccccagccaatgatctcggcattttccggggtacagaaataccgtaccgggtcggcgtctgtctccggttccagctccagcatggagaagtccagaggcaggccgaaaaacgtcttgacgtcctctcgagttgacataaagttctcccactccactctgctcccgccaggcctttgcccggcgaggccccggggaaggtgtcatctacagcttacttcagcttttccgccacaaaatcatccacggtggccagtgcatcatccagcttcagcaggtcactgccgccgcccatggcgctatcaggcttgccgccgcccttgccgccgcagatggcgcagacactcttcaccaggtcgccggccttgatgccgcgcttcaccgcctcgggaccgcagactgccaggaaggtgatcttctccccattggcagaagccagcactgccacaacatccggggccttgtcccgcaggaaatcgcccatctgccgcagggcgttcgcatccatgccgttacggatagcggtcaggaccttcaggccgcccacgttcttggcggcggtcaggaattgccgggcctcgcccagggacgcctcggacttgaacttctccagctcatggcgcagctccttcatctccgctgcctgctgctccgccttggcggccagctcaccaggtgttgtcttcagcacttgagcggcgtggaacagcagctcctgattccggttcatggtgtccaggctcagtcggcccaccgtggcctcgatccggcggacgcccgaggcgacggagccctcggacttgatgcggaagggaccggccttggcggtgttgtccagatgggtgccgccgcagaactccatggagaagtcgcccatctccaccacgcggacgatatcgccgtacttctcaccgaacatggccacggcgcccttctttttggcctcctcgatgggcagcacctccgtcgctacggggtagccctccaggatggcgtcgttcaccagcttgtcgatctgagccagctgctccggggtgatagcctcaaagtgcgtaaagtcaaagcgcagccggtccggctccaccagggagcccgcctgatgcacatggtcgcccaggaccttcttcagggcagcgtccagcagatgcgtggcgctgtgagcccgcatgatggccttccggcgctccatgtcgatggatgcggtgacggtctcccccacgctgagggtgccggagaccaccttgccggagtgcatgaacttgccgcccttgttcttctgaacatccgtcacctggaaggtgccgttgggtccctgaatggtgccgtggtctcccacctggccgcccatctcggcatagaacggcgtctggtccagcaccaggatgccctccacgccctgagccagctcgtcccgcagttccccgtcggccaccagggccaggactctgccctgctcgctggagcgatcatagcctacgaactccgtggcgggcatgtccttgccgaactcgatgcctgcccagcccaggtcgcccagggcctcccgggccttgcgggcgcggaccttctgctcttccatcagagccttgaagccctcctggtccacggtcatgccggcctcctccgccatctccacggtcaggtcgatggggaagccgtaggtgtcgtacagcttgaaggcgtcagcgccggagaacacggtctccccctgggccttgtgggcggagagcatatcgtcatagatcttcatgccggcgtccagggtcttggcgaagttctcctcctccgtgcggatgaccttggtgatataggcttgccgctcccgcagctcgggatagtggccctcgttctcatggaccacggtgtcgcacacctcatataagaagggatggttcactcccagcagcttgccgtgccgggcggcccggcgcagcaggcggcgcagcacatagccccggccctcgttgctgggcagaacaccgtcacagatcatgaaggtggcggagcggatatggtcggtgatgacccgcagggagacgtcgatcttgtcgctctgctcgtacttggcgccggtgatctcgctgaccttgttggtgatgttcatgacggtgtccacgtcgaacagactggccacgttctggctgacgcaggccaaacgctccaggcccatgccagtgtcgatgttcttctgcttcagctcggtgtagtggccctctccgtcgttgtcgaactgggagaacaccacgttccagacctcgatataccggtcgcagtcgcagcccacggtgcagccgggctttccgcagccccactcagggccccggtcatagtagatctcggagcaggggccgcaggggccggagccgtgctcccagaagttgtcctccttgccgaacttgaagatccgatcctcggggatgccgatttcgtcccgccagatggcgaaggcctcatcgtcggcgggggtggtctcgttgccggcgaacacggagggatacagccggtccggctccagacccacccattcgggagaggtcaggaactcccaggcccagtggatcgcgtcccgcttgaagtagtctccgaaggagaagttgcccagcatctcgaagtaggtgccgtggcgggcggtcttgccgatgttctcgatgtcgccggtgcggatgcacttctggcaggtgcagacccggtggcgggggggctcctcctccccggtgaaccagggcttcatgggcgccatgccggagttgatcagcagcaggctggcgtcgttctggggaatcagggaaaagctgggcagccgcaggtgttcttttgtctcaaagaatttgagaaacatctcccgtagctcgttcagtccgtatgtgggatgtgccataaatgttcttcctcctaaaaatatctttttattctcaataatatatgataaataaaagcaataccgcctgttatttccagtcgccggcatggtgggatccgtcagctccgccgcggccagcagctgccgggccgccatgccgatcttccggggcagatccggcagttccctgtccagccgtacctgcagctccacctgtcccttgaccacgccccagatgttgttctccagatgccggggccagtaagccaaggagatgtctcccgggttcggatgtccgaacgccgcgacaatcaaccggtgcgcccgaaagaaagcccgataagaccgggcggttcccttccagaagggaaccgccgtcagctccggcggcagttcctcccagcagggagtgccctcccatcgatcccacagagccagcagtgccgtccccagctccggagccgtcagcggcggggacagggtctttaccgctgcaagaatgtgcgaaggcccgctccggctgcggatcaccggaaacaaaaggaatctcccctctgaatcggaaaaaatctggatgccacccaggcgggacgggtgcggagattgggctcgctgaaagaacaccagtatatcccctcttttctaaagcagaaaaaccgcccctgacgcacgtcaggggcggaagaacttccacggtaccaccctgatctgtcccatggggacatctcatgtcatccgctaacggggatgagccgtcccgctcgccgcaggccgctccaaagtggctgctccgcggcgtgggcaaggggctcgcaccgtctcccctctcgcttggccggtctcgcgaagctggctttgtcatagcttttcgctgttttcagacacaattattataaacgtttctgcccggttgtcaacgggaaaatcacaggttttttcccttgcctccggaaatccccgggaccttctttcctgtcagaatgcagacgccgtccgccacgcacttgccacagccgatgcagctggtaggtccgctcttccggctgtacgccgcccaacagtaaaacgcagtgcccgccagaatgatccccgtcgccagaatctcatgccacgccatgttgcagcccccctttttgtttttagtctaccacacaaaggggcacttgtctgtggcagctgcaacagccgcaggcccagcagcggcagcagctccgccgcaggagccggaagttccggcaggggaaattcctggggctccaccacgccgccgcccggccgaggcagctgccgctggacgcagaggaccggttccgccaggctggacagggtgagaccgtccctggaggacaggccataggtgaccaccgtctccgccgtgatgcgctccagcggcgcggtacagtcccccggcaccagcagcacccggcacagggcggccgtatcccccagctccccgcacccccggcgggtcaggaccagcagtggccaatactgttccgccagcgcctccgcccgctccgcccccagaacgccgggcggcagcagctttctccacgccgggggacagcagaagataactccctccatcaaaacacctcccggctagtgtctgctggaggttggattccatgcaaaaaatttgctcgtcattttgcacctgccgtgctatactggaacgtaagatactggaaacggggtgatctccttgcatttctgggcccatctgcggaccataaaccgccaccgggcactggtgcggaagtactgcttccgcctggggctgtactggcagggcctgacccatgacctgtccaagtacgcccctgtggagttctttgccggggtgaaatacttccagggggatcacagcccaaacgacgcccagcggaaggaacatggatacagcgcctcctggctccaccacaagggccgcaaccgccaccactttgagtattggacggattacagccccaccggcgaggggatcgtaggtgtggagatgccgagaaaatatgtggcggagatgttctgcgaccgtctggccgccagcaaggtctaccggggaaaggatttcaatcccggtgacccttaccagttctatctccggggcaaggaccggcggctgctgatccacccggccactgcagcgcttttggagaccatgcttttaaagctccgggatgagggcgaggacgcggcctttgcatatatccggcaggagatcctgggaaagtcccaggatgccccaccgccggacccccggcgcttttgacaggtgcacagattgtccccctccactgatgccgagaagagccgtatgccggcgagcaaacattgaccatgtttgctcgccggcatgagactgggcagcgatttacttgatatgggcgccgatctccgtcagcagccgcagcaggggccgccacaggtccgggtggtgctccagcagaaaggtctggacctccggggccgtcaggccgtctccccacagcagcacatggctgccggaggcgaactcccccacggcggtgggcgccacggcggagaccgccacggcgatcttggcggcaatggccgccacgccgccggcatagacccccacggcgctgacccccagggccagataccccagggccgccacgccgaaagccgccaatcccccgccacgatgcccagggacagcattcccatggccagcacgccgaaggtgaacaggcccacccccacgatgccgatggccaccacgccgatggcgcagttgccgatggcgatgatgcccttggccgtgttatccatggacagtttcccgttccggacgaagccgaaccggatagacaccaggggcaggccgaagatccgggtcttgctgtcgtagcggtagaccctgcccttcacataattggtcagctcgtccacctttttttccagccggtctgcctgcttggaagagatttccccgcttccgccgcatggattgtccggctcctccatccagtccttcaccagatagtccacggacacgccgaacagctctgacaaggagatcaacttcacaagttccggcatggcagtgccgccctcccacttgctgacagactgccgggtgacccccaggcggtctgccagctgctcctggctcatgccggacttccgccgcagccccgtcaatttctcggaaaatgtcatcggagaacactcgctttctcatttggatgcccttatgataagccacccgccgcgcacctggcaagaacgcggcgggtggaactttgtcaactccaggttgcagcccttgaggcccaggggattccagatttttgccaggctccgggtgctatggcgggagttcctgctgcgacgggcgatgaggcagggtgttttaccagatccccagcaggtgctggaccagcaggctgacgccggcaatggccacccagcagcagaagcccatgaagatgggcttgccgccggtcttcaccagcttcacgatgtcggtgttcagaccgatggctgccatggccatgacgatgaaaaacttgctggcgtttttcaggaagctcaccgcagccgcagggatgggcagaaccgtggtgatgatggaagccagcaggaacagcagcacaaaccaggggaagattttcttgatgtccacctgggcgccgccctgctttccctcccggcgggtcctcagcagggccagcaccagcgtgatggggataatggccaaggtccgggtcatcttcacgatggcggcggtgtccagggtattggcgccgggatgcattccatcccaggcggcggccgccgcagtgacggaggaggtgtcgttcaccgcggtgccggcaaagaggccgaagccctcgttggagaggcccagcacacctcccagagtggggaagatcagagccgcgatgacgttgaacaggaagatcacagagatggcctgggcgatctcctcgtcatccgcgccgatgaccggggcagtggcggcgatggcgctgccgccgcagatagaggagcccacgccgatgagagtggagatgttgctgtccatgtgcagggccttatagagggcgaaggccacgatcaggctggtggcgatggtggagacgatgatgggcagtgactgtccccccacctgtaacacgctggagagattcatgccgaagcccagcagcaccaccgccagctgcaaaaccttcttggaggtgtaggtgatgccgcttttggcacttttctgatccttccagaacagggcgatcaccatgccgatgaggatggcgaacaccgggccgcccaccacctcgaaccgctggcccagcagccaggcaggcacggcgattaccagacagatcaggatacccagcgcgttttttttgacaaattccataattcgtttcctttctctcttgacaatcggagttgtatcatatcatgccgttcaggatttgtcaaaaaaatccggggcggcctctggccgccccgatgatgcaatgccaggctcagtggagggggatctccgtctctccccacagcagatagtccgcttgagacagatccacaggccgggcgaagaagccgctctgctccatccagccgctgccgcccttgctgaagctgctggcaacctccacctgcgtcccatctttcaaaaccagcagcagttctgtgtcggggatagctatatctgagaattccactacctctccgctgtcagccgtcacaagcgccacggcgtctctgccgttttctgccgccgcggcctggacggcgttctcatcgtagtgatagctccactggagccccagaggagagaccttcagacgatccatggtcaaggtgccgcagggcgcctgtgccgtgacaccggcgacatccaccgccagcaggctatcttccgccagaccaccggagagcacgaagtcaaaatcgccggagaagatctccgtataggccttcccatccgtctgcttccacagccctggtatgtggaggacctttccctccaggtctccgtccgccagaatggagagtaccactgtcagcgtgttgtccgcaggatccgggtcctccagccaagtgaactccgtggaataagagatcgccgggtccccgccgtccggctcccgcagctcaagccactcgccgttcaaaatatcatcgccgaagagctggtaggtttcattttcaccgtccaagggtggcaggaccgtgccctctggggcctgaatctccagcatcaggtagaataccccatccatgccgaaggccgccataggtgtcatcatggctccgcctgcggagaccgcacccgacaggccgccgctgagggtgtccaccaccgcctgctcccccgggtccagtctgccgaaaaagctgtcccatagcgacgcagtaacagccgccgccgtgcccaccaacagcactgctgccagtaccgccgccatcccccgtttcatccacaagctccggtgctggaccggcggtccggcctgctccgccatcagggcgtccgtcagggcggacctccccgcttccgtgaactgtacctggtccaactcactctgataagcattcctatccataagcgcctcccagcatgttccgcaattttgccttgccccggtagagatacgtgctgacctgactggccgtgcagcccatcaacgtcccgatctccgccggctcgtatccctcgtaataccgcaggtacaccgcctggcggtatcgctccggcagggcctgcaccgccgccagcacaggcctctcccccggctccggcagatggaccgccgcgtgggccgccgcctccaacggcaggcgccgccggacccaggcggatttcttccagtccttgcagcagttgacggccacccggaccacccaggcccgctccagccgctcctccgcaaagcggcggggactggtcagcagcttcaaaagcaccgtctgacagatgtcctgggcgtcgtggacgctgcccgtccaggtccaggcgatccgcagcacggtgtccgaccaccgctctaccagttcctccgcttccgggcgggtatatgtgatttgttccgtacaatcaactcctttgccggcgccgttctgctgataaaacgaatgatgaggctgccatctgacagggacatacaaaaagcccgccgggaatatcccggcgggctgaccgaatgtccgcttactgctcttccagcacggccttgtgatagaccttcttgccctttttgatgaccgcgccctcgccgcagcagtccttgcagctgaacctggcctcaatatcggccaccttctggccgcagaccgtgacgccgccctgctgcaccagccgccgggcctcgcccttggaggcagccaggccgcactttaccagcagggtcagaatgtcgatctctccctcggcggtgaaatcctcccggcagagcttggtgcagggcatgttggcgctgtccccgccgccgccgaacagggcgcgggcggcctcctgggccttggcggcctcttcctcgccgtgaaccagcttggtcagctcgaaggccaggatctccttagcggtgttcagctgactgccctgccaggtatccatctcgtcgatctgctccagcggcaggaaggtcagcatccggatgcacttgagcacatcggcatctcccacgttccgccagtactggtagaagtcgtagggagaggtcttgttggggtccagccacacggcgccgctggcggtcttgcccatcttcttgccctcggagttcatcagcagcgtgatggtcatggcataggcgtccttgcccagcttgcgccggatcagctccgtgccgcccagcatattgctccactggtcgtcgccgccgaactgcatgttgcagcccaccgtctggaacatgtggtagaaatcataggactgcataatcatatagttaaattccaggaagctcaggcccttttccatccgctgcttgtagcactcggcccgcagcatgttgttgacggagaagcaggcgcccacctcccgcagcagctcgatatagttcagcttcagcagccagtcggcgttgttcagcatcagggccttgccctcgccgaactcgataaaccgctccatctgcttcttgaagcagtcgcagttgtgctggatggtctccggcgtcatcatggaacgcatgtccgtccggccggaggggtcgccgatatagccggtgccgccgccgatcagggcgatagggcggttgcccgccatctgcagccgcttcatcaggcacagggccatgaagtggcccacgtgcaggctgtccgccgtggggtcaaagccgatatagaacgtggccttgccgttgttcaccagctcccggatctcctcctcgtccgtcacctgggcgatgagcccccgggccttcagttcctcgtagatctgcatgatttgtctctccttttgtccgtttgtgaaatctgggacaggtatcaaaaacgccctctgtcccccaggggacagagggcgagaagttctcgcggtaccacctctgttcgcgccgccctcgcgggcagacgcctcaggccgtgcgaacacacggcggcgctgtaacgggcgctcccggagcacgcctactgggccgaaggccgtttgggtgccagctccgcggtgtattcgccgggccctgcccgcctctttccaccagaccagaggctctcttgggggcggtcttcccgggtactgctccgcttcatcactgtaagaggtattctagccgattttttacagcttgtcaacgggtggacggcctttctttttgcggaagaaatcgtatacacccttctggcagtcgtcctcatccgcctgttccagcatctggcggagacggctctccgcctcctgaagcggggcgcaggcgcagggtgtccgccgcaggatctccaggacctcatacatctcgccgccgagccgcagatagaggtacttgtaccggatgttctcctccgctttctccttatagaactccgcttcccgcctgtatgcctccgccgtctccagatcgtccattctgacacctccttaaattttgtgtctatattctagtacgctttttacatagtaactcgttttgtacttaaaatcaacttatattctactgaaatggagtttactatgaaaaagccacgggacagtcatcttggatttcgcatggataaggagacacatgacaagctgttttatatcgcggaatatgaaggacgaacaggcagcgggcagattctttacctgatccgccgctgtatcacggagttcgagcaggtccacggcaaaatcaatctggaggaagaactccgggactgaaggagccccctcccggtccggcgcggttttctgcgccgggcttgattttcgcgcccgcggccgctatgataggatacagatatttttcagaagtgaggtgccctatgccccaggatcccagacagcgggacggctgccaattcaccgcacagaacatcacagcggcccaggagaagaatccctttgccaagatctccgacatcgtctatgaactgctggagaaggccatcttctcctccgccatcccgccggggagcaagctgaacatctccaagctggcggagcagatgggggtcagcacctccccggtgacccgggcggtggagcggctggaggaaaacggcctggtgaccgccgtccgcagcagcgacagcaaataccgcagctacttcgtctttgacctcagcagcgagtccctggaggacctgttcgtggcccggcgggccatcgaaggagaggcggccttcctctgcgcacagaagcggactctgattgacctgcccaggctccagaagctggcggaccagttccagtccgcctggcaggactttgcgaaggatctggataccgcccccaccgcctccgagcgggccaagatcgacctggagttccaccaccagctggtgctgaccacagagaacgagtatctcatcgacatgttcgaaaccctccagggcacccttcactacctgtctatccgctcctgcgagttcgttgccacggaacagaaaaaggacaatctgatcgtcatgggctcccagcacgtggctatctgctccgccatcggcctggggctgccggagctggctcgctccgccatggagcggcacatcgatttctgctgcagccgctgcctcatcaaccgcacctttcacgccgccggatcccgctgacggcggaacgaaagcgccccagggcaaagccctggggcgctttcgtttataggagtgtcgatttcagcaaagttatttctgggccgccagcttctcgtactgggcgtaccgggcggcgcactgctcctccgcctcggcgaagagctgctcggcgatctgagggaaggtgcgggtcaggccggagaaccggacctcgcccatcatgaactcccgcagcttgccgttgggggccttgctgtccagctggaaggggttcttcccctccgccgccagctcagggctgtaccggaacaggggccagtagccgcactccaccgccagcttctgctccgcctggctcaccttcatgctcttggcgatgccgtggttgatgcagggggcgtaagcgatgacgagggacgggcccttgtgggcctcggcctccttcagggccttcaccacgtgggcggggttggcgcccatggacacctgggccacatagacatggccgtagttcatggcaatcatgcccaggtccttcttgggggtctttttgccgctggcggcgaactgagccaccgcaccgatgggcgtggccttggaggcttggccgccggtattggcgtacagctcgttgtccaccaccaggatgttcacgtcgatgccggaggccagcacgtggtccaagccgccgtagccgatgtcataggcccagccgtcgccgccgtacatccacatggtctttttcaccagctggtcggcgttgtcccgcaggaaccgcacgtcggcgctggagtcggcggtctggttcagggcggcgatcagggcgtcggacacggcccgggtcttgtcgccgtcgtcgccgtcttgcagccagctctccagggcggccttcagggcagcgtcggaggtggtgtccagggcggccttggcgtgggtcttgacctggttgcgctgctggtccacggacaggcacatgcccagggagtattcggcgttgttctcgaagagggagttggacagggccgggccgtgaccggcggagtccttcaccatgggaatggagggcacggacaggaacatggcctgggcgcagccggtggcgttggcgatgtacatccgctcgccgaacagttgggtcatcaacttcatgtagggggtctcgccgcagccggcgcaagcgccggaaaactccatcagcggccgctggaactggctgccccggacggtgaacttgtccagaggattggccttctcggagagggacaggcagtgattccagttgtcctgctccggcatctgggactccagcggcttcatcaccagggccttctccctggcggggcacacgtcggcgcagctgccgcagccctggcagtccaggggatccacctggatgcggaaggtataattctccatccccctgccgttggccttgtgggtgatgcagccggccggggcctgctccgcctcctccttggtaaacaggaagggccggatggcggcgtgggggcacaccagagagcactggttgcagccgatgcagttgtccggcagccactggggcacatccacggcgatgccgcgcttttcgtacttggaggtctccacctccgtcacgccgtcggcaaagctgaggaacttgctgacagggatcttgtcgccggcctgggcgttaacggggatcagcacgtcccggacgtagtccggcacacctgcggtctcagtctgctccaggggctcgtcgggcaggtccttccagctgtcgggcactcggatctcctccacggactggaggccccggtccacagcggcgtagttcatgttcaggaccttgtcgcccttcttgaagtagctgtgggtgatggcgtccttcatgtactggacggcctcatccaccggcagcacgccggagagcttgaagaacgccgcctggaggaccgtgttggtccggttgcccagacccagctcctgggcgatggacacggcgtcgatggtatagaacttcacatggttccgggccagcgtccgcttcacgtggttgggcagattccgctccagctcctcccccttccacagggtgttcagcaggaaggtgccgccgggcttcacctcgtggacgatgtcataggagtggatgtaactctgcttgtggcaggccacgaagtccgcctgggtgacgtagtaggcagagcggatggactccttaccgaagcgcaggtggcttttggtgacgccgccggacttcttggagtcatattcaaaatacgcctggacgtactggggcgtgttgtcgccgatgatcttgatggagttcttgttggcgcccacggtgccgtcggagcccaggccccagaacttgcactcgatggtggagccgccggcggtgctgatgtgttcccccacgtccagagagcggcgggtcacatcgtccacgatgcccacggtgaagtggtttttctgctcgccggccatgttgtcgtacacagccttcatctgggcgggggtggtgtccttggagctgaggccgtaccggccggccagcaccttgatcccgctgcgcccggcttccgccagggcggtgcacacatcctcatacaggggctcgccgatggcgccgggctccttggtccggtccaggacggagacggtctggacggtatccggcagcttggccaggaagtgggacacggagaaggggcggtacagatggacctggattatgcccaccttttcgccctgggcgttcaggtagtcgatgacctcccccagggtgccgcagacgctgcccatggcgatgaccacccggtccgcgtccggcgagccgtagtagttgaacagctggtagtcccgccccgtcaggtcgctgacggccttcatgtattcctccacgatggcgggcaggcggtcataggcgccgttgcaggcctcccggtgctggaagaaggtgtccgggttctggacggtgttgcggaccgtgggatgctcgctgttcagggcccgggccttgaagcggcggacggcgtcccagtccaccaggcggctcatgtcgtcgtagtccagcacctcgatcttctggatctcatgggaggtgcggaagccctcaaagaagtgctggaaggggatgctgcccttgatggcggcgagatgggctacggcgcccaggtccatgcactcctgcacgctggaggaggccagctgggcgaagcccgtctggcggcagcccatgacgtcagagtggtcgccgaagatggacaggccgtgggtggacaccgtccgggcggagacatgcatgacaccgggcagcatggagcccgcgatccggtacatgggcgggatcatcagcagcaggccctgggaggcggtataggtggtggccagggatccggtctccagcgcgccgtgcatggcgccgcaggcgccggactcggcctggagctccatcagcttcacaggctggccgaagatattcttcatgccggcggcggcccactcatccacgtggtctgccatggggctggagggcgtgatggggtagatcgtcgccacttccgtgaacgcgtaggagatataggcggctgcctcgttgccgtccatggtcttgaatttcttgaggctcatgcagtctcgctccttttttccatcctctcggggaggacagcgtgatttcctttcctactttaccgcagggggatgcctcctgtccaaatccatggaatttatgaaaaatcccgcggattttccacggatgcggacggcaatctccccagttttcccaggagtttttgtgcccggccgcgcttttgcgtccaggccgggcatgtgcctgccgctgttttccggctttttccggcatggttcggcccggcgcgggacaagctagggcggaggtgatctaaatgcatgatgacagccgcaaggtagagctcccccggcggagaaagcaggagaagcccatccccagcgtctatccggtgctggacaccgatctggcccgggacaacgtggaaaacgacattccggcggcagacctggaggacctgtgaggactccggacttcttccccacagctgggaggtgaagcgaatggcaagcatttccgtctccctggaccggaacgcggaccggcatgacgtgaagctgctgaagcgggagctggacaccctgccgggcgtcacctccgtcagtgtcagcagcggcggacagctggcggtggactacgacgccacaggcgtccggcaggcggacattctggaaaagatccaggcgctgggctaccacgtccggcaggaacacgcataacaaaaccgggaaccggccaaaaagccggctcccggtttgtttatgttccgttggcggactcccggggcctggaagaaactcctcccccgccgcctccatagccagactccccgcggagagctccgtgaggcggggaacgaactgttccgccccgcccgccgggaacgccgcccgcaggcggatgtccgcgccgtacgccgtgtcccgcaccacgccgccgcaggcggtgatctccagcttcacccgctcgaagaggggatatgtgcagggcacgtcccacagcgtccacaggctcatggtgctgatgcccacggcgtccagggcttccttggctcccttggtataggcccgggtcagtcccccggcccccagcagcacgccgccgaagtacctcgtcaccacgcagcatacgttggtgacgctctcccgctggaacacgttcagcatgggctggcccgccgtgccctggggctccccgtcgtcggagtagcggaccacgccgccctcctgcagcagatagcaccagcagttgtggcgggcgtcgtagtagcgcttcttcatctcctcgatgcgctcccgggcctctgcctcggtctccacccgccagatgtggctgatgaagcgggatcgcttctccgtgaacgcgctctccccgttttcaaagggcacccgataggtggtcatggccgtcctccctgtctgctccgcgctcatttccacacgtcccgccggtccgtccggcccgccagatagtccatggacacgccgaagtggtccgccagggcgcacagattatggaaactaggcaaattatttccagactcaaatttctggtaatgccgttctccaattccaatggccgtggcaacctgggcctgggtttctccgcgctcttttcggagcgatcgcaatttttcctgaaattccatgcgtcccccttgacacgccaaattttaggtattatactaaacttagaaacacgccattttttatgttattcgaggtgatttttaggatgacagattttatgaaatggctctatccccggtatatccgcccttatgtggaggcggcgccccaggaagaatatgagatgtggctgtccctgatggagagcgacttggaatatcaattccgggaggaattcgacaagaccctggaattcaccgccatccacgccttcctgctgggcctgcgcaccggggcgggcctgggggcgctcattccacaaggaacggcgccatctgccccaggaccttcggcgtgcacaccgccgtgaccgcgatggtctccccgtactccacgttctccaccttggcctcccggtacagctggtccagcaggccgcccttgtcgtaggggatgtgcagcacacagcggcggctgccgctgtccaggcgttccccgatcatctccaacagcttgtccacaccctcgccggtcttggcggagagggagcagatgtccgccccgtggggcatgatctctccggcgggcagccggtcggacttgttgaacacgtcgatccggggcagctctccggcccccagctcccggatcaggttctccaccaccgccgcctgctgctgccactccgggttggacacgtcgatgacgtggagcagcagatctgcgtactccaactcctccagcgtggccttgaatgcctccaccagctggtggggcagcttgcggatgaaccccaccgtgtcggagatcaccacgtccagcgtgtcgctgaccgtgagaaggcggctggtggtgtccagcgtgtcgaacagccggttgttggcggggatgcccgccccggtcaggtggttcagcagcgtggacttgcccgcgttggtatagcccacaatggccaccaccgggatttcgttcttctgccgccgctgccgctgggtggagcgcacccggcggacctcctccaggtcctcccggagcttgtcgatcttccggcggatgtggcggcggtccgtctccagctgggtttcgccggggcccttggagccgatgggccccttgccgctggtgcccgcctgtcgctccagatgggtccacatgccggtcagccggggcagcagatactggtactgggccagctccacctggagccgcccttccttggtcttggcccgctgggcgaagatgtccaggatcaatccgcaccggtccagcacctgaacgcccagcagctccgtcagcacccgcatctgggagggggacagatcgttgtcgaagatcaccatggtggcgccggtgttctcgcagtagagctgcacctccgccaccttgccctccccgatgaaggtccgggggtccggggacggccggttctgcagcacaatccccacggtctcgcctccggcggtctccaccagggcggagagctcctccatggtgtcctcgtcggcgttttcctcttttttcagcaccggggagttcaaccccaccagcaccactttgtctcgtacttcctgtgtctctgccatgcaaactccttatttttgataggcctccacgacttggcccacatagatccggtgccagccgccctgccccggcgtgtagaagggcaggatctccccctcccccagcacgcaggcagggtccatgtcctgggcgtacagcttccggcacaccaggacccactccgcctcgtcaaagaagggcgcgtccccggccccccagcggaccgtcaggccgcacgctttcaccttgtccacgtcccggccgctcttgctgccgcagagggcggtcactttttttgcctcctccggcaggatggagacggtgaaataatcgtgggactccataaattgataggtatatcgctcgggccgcacgtagactgtgcagaccggcaggttccacagccggcccaactggcaccagccgatggtcatggtgttcaggccggtcttgtctccggcagtcagcagcgggggctgccgtccgaaaacatgcaggatctccggcgtcaaacgctccaactccacaggatgcagcttcatgcaaacgctccttccgcttcattgataccatacagtatatgcgcttttgccggaaaagtaaatgaaaaaagggcctgcccaaccggcagaccctttttgtgacgtgtcagacttacttgtccagaccgaacttcttgttgaacttggccacgcgtccgccggtatccaccagcttctgcttgcccgtgaagaaggggtgacacttcgagcagacttccaccttgatatccttcttggtagaacctgtctcaatcacattaccgcaggcgcaagtaatcgtagtctgctgataattgggatggattccttccttcattgctctcgttcacctctttctgatccagactacctcgccggagctttcaccccataaaggcgtttatcagtgtatcacacggacgtcaagattgcaagaccttttttcatttttccggagattttttcaggaggggcgaaactgctccacccactccggcgtacagtccgcaaaccagtcctggtgatccgggtcctccgggtcgtagagccggtccgtcagggcctggaaggcgctccactgctcctcggtcaaaacatggacggagatgccgtcctcttcctgccaccgctccaggatctccgcctcctgctcccggttccggagccgctggtccgccatggcctcccggccgcagcggtccaccgcctcccgcaggtccggggagagggagtcgtacagatcactgttcatggtgaggatggcgggctcataaaatgccgggaagatggtcacgtccgtctggaccgtctggtagcccgccgcgtccgcctccgccagggtgctctcctggccgtcatagtatcccgcagacaaaggcgtcatcacatctaaaaaactggaggggtagagttccgctccccagcaatccacatacgccacggacacttccagcattcccgccgtgcggatcttgagcccttccagatcttccggggcagtcaccgcacggccttcagaagtcgtcggataccggaagcccagctccccgtatgccaagccccggagccccagctccgccaggacaccgttcagtgcctctccgccggtgctgtccaggacctccgccgccgtttcggcgtccgggaacagaaagggcatggtcacggagaaaaacggtctgcccaactcttcttcgtcgccgtaggagccatatacgaaactgctgtccagatagaggtccacgatcccggccgcagcctgctccagggaggtaaccctatcgaggggcatcggctgaacctccaccgccacggcgccttccgtggcgtcggacagtgcctcggcaaaagattccgccgcgtcccagcaggtggagccctccggctggcccaccaccagggtccaggttgtctcaacattcttcggaaccggcggctcctctgaaacctcctccggcactccgccggtgcagccggtgagggccaggaccgccagaccggcagcggtcagcttggtaagacggcgcttcatttcaggtccctccttcttgttccagcgcccgccccaggtccgccagataccgagcctgctggcggcggaggtagcccttggcaaagaagcgcatccagggcttttttacggtgatggtctcggtgaaggtgacctgggtgccgccgccctccggccggaattccccggcccaccggcccgccagattggcattgtccaggtcaaaggcccagcgggacagggggcggcgttccgtgacggtgaagcgggtgggaaagccgcttctgtcgtactccgtaaaggcgtcctcaccgacgtggtccagacggctcagatcgctgcgccactgccagcagtccagatccgtcaccaccgcccacacccgctccggcggatacggcaccagggccgtggctatactgacgatttcccttcccattggccttcctcctcaaatctccatggtctcgcctgcagccaggaaatacagggcccggcggaccaccttcttttccagcacccgctccagggcccggctgtatgcctccagctgggggcggtagtgctccgcccgctgccggacctccaatgccgagaacacacggtccgttttgaagtccaccacggtcaggccgtctgccgtctcgaagcaacagtccaccacgccctggaggaggatttcctcccccgccgccgcggcgggatcgtagtcccgggcatccatcagcagggtgaagcgatactcccgcaggacgcttcggcttttgcggatctcctccgccaggggggagcggagaaaccgctccaaaggcgcggtctccacggccgcggcctgctggtccgtcagcaggctccgctgccgcagcgcctcgatctggcccgccacgtcaacgtttgagaagtccaggtattgcagcaccaggtgggtggcagtgccccgctctgccggggtcaggccctgccgctcccgccggaaattcggctggctcaggggccggaggtacggggtatgggcggcatactccgcgatctcctggtccgcagggcggcccttcagctgggtggccgtcaccttggcgggcagggccgtctcccgctggtaggggtagatgaaagacagcagctccgggtcaaagagggcggtctcccctgtctcctccgccgtcgcctggggccgagcgggccgttcccggtagtcctcactgtcatgtaaaaacacttgccaggatctgtcctctccaatatatagctggtcaatctctgtctccgccatagcccgcaggggtgcggcctccggccggcacagcaggggcagcaggacccagtcccccagggtgcggccctctgccaccgtctccggcagcacgggacaagcagccacagcggccagcttctggagccgcccggtggcgttgtacagggcgtccaccaggatcagcttctccttgggccgggtcatggccacgtagaggatgcgctgctcctccgctaggttctcccgccgcagcttttcctgaatggccagccgggccagggtgggatactggattttccgctccaggtcgatgcgcttgggccccaggcccatgtccgggtgcaccagcaccggcgtgtcgaagtcctgccgggagaacgcgtggtccagatctgccaggatgacgatggggaactccaggcccttggacttgtggatgctcatgagccgcacgccggcagcctccgccgggccccgggtggcgggagcctggtcctgctccagcagccgccgcagctgagtgacgaaggcgaagaggccccggtatccattgctctcaaacttctccgcgtgctggctcagggcgatgagattctcccgccgggccgcaccatcatccatggcgccgaagacccccagcacattcagtcggttgtagatgtgccagaccaggcggtggacactcatgtcccggcccgcctgccgcagatccgagaggattgccaggaagtctttgcagtcctctcccccatcggcagtcacagcgtcgtagtagtccccggtgggggcggcggagcgaacctccgccagccggtccgccgtgaagccgaacaggggtgaccggaggacggagatcagaggcacgtcctgccgggggttgtccacgatctccagcagggacagcatgacggagatctccatggtgtggaagaagtccccgctctcctggaaagaacaggggatgtcccgctccgccagggcggcggcgaaggcggcagaccggctgccgggggaacgcatcaggatcacgatatcctccggccggcaggggcgcagggtgccgtcgctctccgtgacgggatagccctcatccagcagcttccggatgcgcgccgccacgaaccgggcctcggcggtgaccttctttaccggcttgtcattctcccccgccttctggtgggcagagatgagatggaactctgtctggcaatccatccgctccgggtaatacgccgccccgaagtggagggcctcgtcctcgccgtagtccatctcccccatctccacagacaaaatgttggagaagatgaagttggtgctctccaaaatctcccgccgggagcggaagttgcgggacagcaggatcttccgctcctctccgtcagccgcctcctgccaggacttgaaccggttgtattttcccaggaaaatggtggggtccgccaggcggaagcggtagatgctctgcttcacgtcccccacagtgaagatgttctgcccgtttttggacaccgcccggaagatggcgttttggatctcgttggtgtcctggtactcgtccaccaggatctcccggtatcgggccgccacctgctcccccagctctgtgggggcaccgccggaacccaccagcaggcccagggccaagtgctcctggtcggagaagtcggcagcgttcagccgcagcttctcctgccggtaccgctccgcaaagtcctccgtcagctccagcagggccaccatggccggggccacggcagtcaggtcctccatagcctcctcctcagagacagacaacaggcccgccagcttcttctcctccgccttgcaccgctcccacacctgtttcagcgcggcaatgcccggctcgtccttccgtcctttgggggtggaaagccgggggaaggcgacggccgcttccgtctgccgggccgcctcccaggtctggacctgggccagggcgtcaaaggccacagacacctggagaaacttctccccgtacccccggtacagcgcctcgtccccctcggtccgggcggaggcggaccggagcagggccccccaatgggcccccttccggcggatggcggccagcagctcggcggcgtagggggtgtcatcaaagccgccctcccagccgccccagacggtccggttctccgccagccacccggccgggtccgcgtggctctggaccttgtcgtacagctccagcaccagggcggccagacggctgtcgtcccgtccggcccccagcgtgtccgccagcaggccacggccctcgtccagctggtcatagaagtcctccagcgtccgggagagcacccgctggcggatcagctgggcctcgttatcgtccagcacccggaagtctggggtcagggcccggctgtccccctcccgggccaggaggtgggtgttctcccgcagcagcgacgtgcagaaggcgtccacggtcttgatgtccgcctgatacacccgcagcagctgccgccggagctgctggtcccccggcgtctggcccagccgcttggacagctcggaggcgatcttgctccgcagctccgccgcggcggccttggtgtaggtgatgatgaggaaatcatcgatattgcagcgttcctccgtcacatagcggaaaagccggtccaccagtacctttgtcttgccggagccggcggcggcggacaccagcaggctgccgccccggttttccaccaccgcctgctgctggggggtcagggtcaattttgccatgttactgtccgcctcctctctctgtctcctcttccacctggcgccagaactcctccggctttaccggcaggatgtagtgcaggtggtcgccgtcccgcccatcctggaagtggcaggcgtcggcccagtcgcagtatttgcagaagctgttgtcctcattgtggcagcaggggtccgcgtcgatgttgccgtcccggacctcccgggcgatctggtggagcagccgctccacatactgccccagccgcccaagctgatcggcggaggccagggcgccggacacgtccccctcccggtttacccgcaccggtaggaaccggggactttgcagagcctcgtgctccatggcctggagcacctccggttcagagagcagcaggcccgttcggcgcagctccttctcccgctggctctggagctgctccggcgtgatatttcgctcggcggagagaatctcatcccgggcagggagatacaacaccccggcgggctcaatgtccatgccaaaccgctgcttgccctcctttttcagggcgaacaggtacagcagcatctggatatccaggcccatccggacggcggccaggtcaaaggctttcttgccggacttgtagtccactacccggagatacagtctgttgtccttcacccagccgtccacccggtccaccttgccgccgattcgcagctccgcgtccggctcgctgaccgtcaccgccggcagttctccgcgctcgccgaaggacagctcgaaggccaggggcacgaagtcggagcagcgcatctcctcggcgatctggtccaccaccgcgtaagcggtgttccgcagccgggcgaagaggtaccggaaccgggcgttccggccctccagattttggagcacctccgccgcatactgctcaatatagcgccgcaccaaggcgtggaggtcctcctctcccactgcggcaaagccgccccggtccagcacgtcctttgtgacgtgctccagcaggtagtggaggaaggttccgatctggggggcgtcaaaggccgccgcccggcgggccttggccttcaggccgtactccataaagtaggcgaagtggcagctccgcagccgctccacccgggaggcggacatggagatccgctccccgtacagcgattgtaccgcgctcctggagaggctcccccgcttcagcgcagccgcccgctccatggccgccatggggggcgccaggacctcgtcatctgcgaaataccgccacaggatcccccctggggcggtccctgcggtctccaaggcagggatccttgctgtaaggcgataagccttatcagtcccttcgtgctcgatacgcagctccggaaacagcgttagcaggcggtccactacaaaggcaggccgcagctctgcaccggacacgtccgccgtgggatagctgaccaccagtccctcccggggctgaaccagagcggcgtagaggttctggagctcaatgcccatctgttccatgccgctgggcgccaggcggataccccgctgggccaattcctcccggtcatcgtcgttgagaatgccgccgctctgtcccacagcgggcagcacatggtcattggcccccagcagaaacaggtaggcatccgtgtgacggtcatttcgggtgatttccgtgacggacacctggtccagagacacggggatagtgcccacgctgtactgggaggccacctgccgcagcaggcggctgaattcatcggtccccataggctcgtcccccaggatctccacgaactggtccaggatggcgcagaggatctcccacagctgggcggtctcctccgcgtcctggaggcgccctgcctccgcctgggcccgcatctgttcctccagcgcgttctggagattcagatgctccaggaaactataaagggaatttactttctccccagctgtaacgccggctttcagcccttcatacagctccgcaagaggtgcgcgtacccggcggcgcagctcgttcacccggtccaggcgggcctggcggcgcttatcccaaggtgcgccataaccgtccggattgtcggtccagtccacatcccggagccacatcttcccgtggatctcccaggtgagaacgtagttttccagctcatcgcactcctccggcatcaggcccgccaggccggtcttcagccaacggaacatgtcctcgtactccaagccgttttccagagcggagaggacgccggtgataaggctccacacgggcttttccaacatactgctccggcggctcagataggcggggatgctgtaccgctcgaataccgtctcaatggtgccctcgtagtcggtcatgttccgggcggccacggtgatatcccggtagcggcacttccccgccgctaccaggcggcggatgtccgctgccgtctgctccacctcggaaaaagcggtgtccgcctcccggacccggatggcggagctgtctccttggtagggctccccctctccgaagaagtgatgctccaaatatcccagggcggagtcgtcggcgctggtgagcgtccggacctcccatgggcagcccgcctggtccgccagccgcgtcagctggtcccgggtgcggagagagacctgaaacatctcctccgcgctgtccggctcccccagcagcgtgacagtgacagaccgagcctgccgcaggatgctctccagcacctgccgctcctgggcgttgaagtacgtgaagccgtccacaaacacgtccttgccgaaagcgtagcgggaggactccagcgcctcgcagagcttggtcatccggtcccgggcatcaaggccggggcggtacagccgggactcataggcgccgtacagcaggctcaggtccagcagcttgtcccgggtggcgccctggatttcccgtgcctggctctccagcagctctggggacacgtcgtagcagcgcagctcgtcgaagaggtccagcagctgctgtaaaaacgacgccttctgagagggacggcgatacaccttcagcaagggggccacctctcccagggccttctgcagggtcaacagcttgccgccggcatccaatgtcacctgagcggcgccgccggtgatggtcagcacccggtcgcacaggcggcggaagctgaggacctccgcatggcggctggcagtgtctccgcaggcacggcacagatccacctccgcctggtgggaggcgtgctccggcaccagcaggatctgccggctggaatcccccagttctccgatccggcggagcacctgttccgattttcccgttttggcccggcccatcaggatcgtcagcatggcgggacctcctttgcgcaatttcaaaattcattgtagcatatcccgccgattcgtgctatcctgtttcttgaagattttccgaggaggactgacccatgcacattccccaaggccccacagccgccctggcgctggagctcttcgacgacgccctggccgctgccctccggccgtcgccggactatgatgtgagccggtggctgtacgtccccaaccactattcggaataccggtacatcctgggcacccggggccggaagcccctgatctgcatgggtatcaacccctccaccgccgcgccggacgctctggaccccaccctccagtccgcccagcggatcgcgctttccaacgggtacgacagctttttgatgttcaacgtctacgcccagcgggccacccggcccgacgatatggagcggtcctgcaacccggtgctccatgcggagaaccgaagggccttctggtatctcctctctctgtccccggcccccgccctgtgggccgcctgggggaacatcatcgagaagcgagggtatctgatggattgtatgcgggactttgccgccgacgccagcgccgccggggccgggtggttcaccgccggccccctgctgaaatccggccacccccaccaccccctgtatctcaagggggacacgaagctgctggccttcgacatcgacagatatctgcgggaccgggcaacctgaaccgctgcgaggcacaaagcaggccgccccccaatggggacggcctgctgtttttctgtgtcacagccactttttcttcttgaagtagatcaccagcgccgccacgatccccacgctcaccagaatcaccgccgggtatccgtacttccagtggagctccggcatccccacaaagttcatcccataccagcctaccagcagggtcaggggcaggaacaccgccgtcaccacggtgaagatcttcatcaggtcgttctgctggatggacagctgggactgataggcctcccgcagttgggccacggactcccgcagggactggaccgcgttcagataccgctccatccgattgcccaagtttgcaaaacggcgggtgttctgcttgcccagcaggctgttgtcgttctccgccagctcgtcaaagatggaatccagctgctcgtagtaccgcttcagccgcagcagctcctgccgccaagcgatgatccggtccagatacgcctcatgggcaccggtgagcacctctgtctccccatcgctgatgtccgcctccagccggtccagatgggccatatcccccctcagcagccggacgaagaagcggtggagcacctgctcgttggacagtgcctcttcctccggcaccagcagggccgcctgggcggcgtcctccgctgcgtcgtcctcacagaagacgaacaggtcctcccggtccagatacagcagcatctgggatgctgccgtccgctcgctgcgcacgtcgtaccagtcaaaggcgatcagatcgaagtcctcaaagccctcaaacgcttcgatctgcccctcgtggatgtagtccagcaccttggcgtccatatagggctccatctcccggatgcgggacatgggcagtacctttcgcatggcggtctctctcctctcggtctctcacaggttttccaggccggcgtccttgggcggcaggccgtcatagagcccggcgcacttccacagtgccgcgagaaaccagatgatgcccaccagcagggcaatcagggccatcagtgccaaagcgtccagcagcaggccgcccagcgttccggcaatctgtgccgccaacaggacaaaccaggcggtccgtgccgaagtgccgttcagatctgtcccataatgggtctccatctccaaaatggcctggatcacgctccaggaaatatacagggcgaccgccagagcagccagctccaggagcgtactcagccagtttgcgccggtcacgcccagcaagtctcccacccacaggatacctgtgtatatggccacagccacagcaaaggggcggagtttcccgaatcgaccgctctctcccaacaattcccctgctgcccgatagagtaagatataacccgcaaaggtcggcagcagattcagtgtatgtccgttgattgtcacataaaaattgataaagatcaagaagaacccccaaaagattcccttcactgcatttcctcctcccgcttcttttgtacatgcctttttccgaaatacagcaccagcacccccgccgcgatcttcacggcggcgtacagggccgggaacagcagcacacctgccgggaacacgtcaagcagattcactccgcccatctccgccatatcccagccgatcagacccgtgaatccgcccagcatcccccggtacgccagataaaacagcgccagctgcaccagatccaatacgccccaggcgatcagcacccatcccagcaggtaccacttccgcttgctaaaggccaaaaaacgctccacccagtccttccgttcctggggcggcggctgcttctcctccggcttcgtctgctccagctggaggcggagcagatagtctgttgtcacaccgaaaatatccgccagggccaccactttgtccgtctccggcatggtctcgtcccgttcccagcggctgacggcctgccggctcacctgcaggcgctcggccagcgcgtcctggctcatgccggctctctgccggagggattgcagcttctctccgaatgtcataggcattctcccttctcttggatgccttcagcttatcaggccgcccggttgcataccagcaaccaagcatggaagttccgcaatctcagattgccttcctctccaacataccacaacagggctccccgcgcaacggctccggcccatattgcaagaaaaaaccaaggcaccggacgtctccgcatccaagcgccccggcctatcgggcgggctccagcacaatgggcaggtccacgatctccagcccccggcgcatggcgtactccaccgtgtaccgggttccgccgggagacccgtcaaaggcggcgatcagcagcgcggcgtggtccaccatataccggtcccgccgctgcatacaggcgggggtgtagcaggcggacaccagggtctcaaagtcacaggcagccaccagccgctcataccgccgccgctggtccggcggccaggcatccgcctgggagggacatgggacggccgcctccaccgtcacgtccgggtgcgtctggcgcaggcggaggacgcactcgcagaaatacaggtcacagcccagggccatgccgcagagaaagtgacggaatccctcctgataggccgcctccaccgcgtctgcgatgcgggccttgagcgacacgcagcgcaggtcctcctcgttataccgccatggcagcttaccgggccggtgcccggtaaagcagcaggccgcctgccgcccccgcatggtctccgcctccctccttctggtctttgattcagtatagaacatccgttcttgtttgtaaagacccacgggaaatttgccgttttttcatttagggacttgcaatttcttccgcgctgtcatatactatggccagaaagcaactgaatactttgtcttcagggcggggtgaaattccccactggcggtacagtccgcgaccgcctgcgcgtatgcacaggcgctgactcggtgaaactccgggaccaacagttacagtctggatggaagaagatgagtgcggcgtggccgcgcgtttgttcgcgctcctgcgttgcgtggatcaccttggagaagccaaagcgtccagggtgttttcaagcaacgaaaaggagtgtatttttatgtccgaacccaatgccaacgccatcaagaacccctcccggcccgcaacaaacgtccgaaccatcacctccctggccatgctggcggccatcgcctatgtggtgatgctcctcagcaagatgctgccacaggtgtccggcttcctgcagatggacctgaaggacacggtcatctgcatcggcgccttcctcttcggacctctgtccgccgccgtcatctccatcgtggtggccgtggtggagatgttcaccgtcagcgacaccggccccatcggctgcatcatgaatgtgctggctacctgcgccttctgctgcaccgccgccttcgtctacaagaagttccacacccgcaagggcgccgtcatcggtctggccctgggcactgtttgcctcaccgtggtgatgctgctgtggaactatctcatcacgcccatctacatgggaatggatcgcgaggaaatcgtggtccccatgctgatcccggtgttcctgcccttcaacctggtgaagggcggcctgaacatggcgctgatcctgctgctctacaagccggtggtcaccgccctgcggaaggcccggctggtaccggagtcccatgcgcctgtcgagggcaagggcaagctgagcgccgggttcctcctgttctccctggccctgctggcaacctttgtggtgctggccctggtgctgatggggattctgtaaatctgaacaccacaggcgcgggggcggataccgtccccgcgccttttactgcggcccatatccgtccctccgcctccctgcgccggtatgtcaaaaccttcccatcccttctcccttttcaggaacgaacagatgtgctataatagaagtgagaaaggaggcggggccatggaccgcatcatcctgcactgcgatctgaacagcttttacgcctccgtggagctgcggagccgaccagacctgcagaacgtgcccgtggcggtctgcggagatcccacctcccgccacggcatcatcctggccaagaatgaaccggcgaaaaaattcggcgtccagacggcggaaaccatctggcaggccaagaaaaagtgcccggagctggtgctgctgccaccccaccacaaactgtaccggcaggtctccaaagaggtcaacaccatctacgagcagtacacggacctggtggagcccttcggcatcgatgagagctggctggacgtcacccataccctccacctcttcggcggtgatgccaaggccctggcagaccatctgcggcaacggatgaagcaggagatgggactgaccctctcagtgggggtctccttcaacaaggtgtttgccaagctgggcagcgactaccggaaacccgacgccaccactgtcgtctcccgggagaactggcagaggctggtctggcctctgccggtggggcgctgctgtacgtggggggcgccgcccggaagattttggcccagttcggcgtgaagaccatcggagagttggcggcctgcaagcgggatgccctggagaccctgatgggcaaaatgggcgtccagctccacgactatgccaacgggctggacaccgatccagtccgctcccggtacgagccggagatggtgaagtccgttggcaacggcactaccttcccgaaaaacctcaccaccgcagagcaggtgcggggcggcgtcgccgtgctggcggactccgtggccacccgactgcggcacagcgggctgtatgccggcggcgtccaggtgacggtgcgggatccccagttccatgaccgctcccgtcagatgcagctctccgcccccacccacctgatccgggagctgacggcggcggccatggacctgaccggccagctgtggaaacccccggctcccgtgcgggccctgactgttaccgccatccatctggttcggtcggaggacgcctatgaacaggtagacctgttcacagctggggcggcgcccaaaaaagaaaaacaggaaaagctggaggcggctatggaccgcctccgtggaaagttcgggaccgacgtcatctcctacggcgcggcccgtccagagaaagaggaggatcccctgccatgacaatagacgaggaaaaacagcagctccgggctacgatccggcgcctcagcgcccagctccccttccggtaccgggaagcagcggaccgggccatcgcccgccatctcctggctcttccagagtatcgcagtgccggagcggtgttctgcttcgtctccgccgggcgggagatcgacacccgtcccatcctggagcagactctggcagacggcaagatgctgtgcgtccctctgtgtgtggcggatggcatcatggagctgcgggccatccgcgacctgaaggagctcttccccggcgcctacggcattctggagcctccggcagacagccctgccctctccccggaccagatcgacctggcggtgatcccctgtgtcacctgcagccgggagggccgccgtctggggcggggcggcggctattacgaccgcttcctggcccactaccggggcgcggcggttctgctgtgccgggagcggctgctgcgccaggagatccccttcggcgtccacgactatcccatcccctgggtgctgacagaagccggactttttgaggacggcacgccatcccggctggaatgactgggaaaaggtccgcctcccacaaaatcgtcaaaatattcccactatctctacaacattttgtgggggtattacctcttgttcccttgacaggtccctggaactctgataagctggaaaaggcttatattttccggaagaccggatcacacgaaggaggacccctgcaatgatccaggacatcatggactttctctcccaggccgaccccgaggtgggggcatctattcagaaggaattcgaccgggagcagcacaacattgagctgatcgcctccgagaacatcgtcagcaaggccgtcctgctggccatgggcacttgtctcaccaataagtatgcggagggctatcctggaaagcggtattacggaggctgctatgccgtggacgtgacggaggagctggcgcggcagagggcctgtcagctgttcgactgtgcgcacgccaatgtccagccccactccggcgccaacgccaatctggcggcgttctttgccctgctgcagcccggtgacacagtgctcagtatgaatctggcccatggcggccatctgagccacggcagcccggtgaacatctccggcaaatatttccgcatcgttccctatggcgtgtctgacgacacagagaccatcgactacgagcaggtgatggccatcgccaaggagtgccgccccaagctgatcctggcaggggccagcgcctatccccgcaccctggactttgccaagttccgggagatcgccgacgcagtgggcgcccggctgatggtggacatggcccacattgcgggtctggtggccgccggtgttcatccctcccccatcccctacgccgatgtggtgaccaccaccacccacaagacattgcggggtccccggggcggcatgatcctgtgcaatgacgacgacctgtacaaaaagatcaactccgccgtgttccccggcacacagggcggtccgctggagcatatcatcgccgccaaggccgtgtgcttgggcgaggcgctgaagccggagttccgggcctatgggcggcaggtggctgccaacgccggggttctggcggaaaagctgatcgagcagggcttccggctggtctccggcggcacggacaaccatctgattctggtggacacccggcactttggcctcaccggcaaggagtatgagcaccggctggatgaggtaggcatcacggtgaacaagaacaccatccccaacgacccggagaagcccttcgtcaccagcggtatccgggtgggcactcccgccgtcactacccggggcttccgggagccggagatggcggagatcgcccggtggatgggcctcatggcaaaagaggactatgcggaccatgcggagcaggtccgtgcggaagtggcggagctgtgcaagcggttcccgctctatcaggactaaaacaacccccgcggaggcaaaggcacccccgcacaggggcatcaaccaaataccgttcatgagtagagcatgaggccaccgtaaatcacccggtggccttgctttgcatgatacaagttgacgcccttattagccctgataggcactacccccctcagtggtttcctggtgaacgctagcaccccccatgcgtgacaacctccaaaacaccagtcagatcaaagctatcaagacataaaatacccccacccaattcgggcaagtctcatcaacttgctcaaattgggtggggtattcatcacaaaatgctagggagccactgtgtcaattgtgggataaatgtgaccagcatcaatgccaccaatgagataatcagcgtggggatcattgtgcgaatagtcttggacaaactggtttctccgatttgattacagaccaacagacataatcctaccggaggtgtcaccaaaccgatacagaggttaaaactcatcatcacaccaaaagtcaaaggatcaatattaaaaaccggtaaaagcggagtcagaaggggcgtcatcatgataatggcagcactggcctccatcaacataccaataatcaagaaaagcagattcagcaacagcaaaatcacggccttactgctggtaatagaggtgaagaattccagcatttgctgaggcaatcccgatgtgaccaccacataactggatgcttttgacaagccaaccaacatcataatagtcgcagtagaaatagatgtctccacaaaaacttgaggaatgtccttccatgtcaggtctttgtaaatcaatccactgacaaagagtgcataggcaacggagaccgctgccgcttctgtcggcgtaaaaatgcctccaaaaatgcctcccaaaataataattggcatcagcaaggcccaaataccgttcttgaaagcccgcaggatctctatggggctgcttttccgataagacgggagatcatgctttcgaccgtaaataaggcagtaaactgcaatggcacacgctaagagaatgcccggcaaaaccgaaccaataaacagtgacgccacagagactgtgctgacacttgcataaacaataagggggatggatggaggaatgatcggacctaaaatagaagaaatagaagaaatcgccgtagcaaattcatccgggtatcccgattttttcattgcggggatcgtaatgccaccaatggcagaggccgtcgccacaccagaacctgagatagcaccgaacagcgtagaggacaaaacagttaccactcccaagctgcctttgatttgcccaatcaacgcatttgcaatgttgatcagtttctcggtaatacttcgggacattagactccctgccaaaataaaaaaaggaattgccagcaaagagctagaattcatgccagcaaagagtttttgtggcaacacgatcagcgccatatccgccatatggagcgctaccagagtaccgattcccaaggcaataaaaatgggaacaccaaggaaagataagaccagcaagaagatgatcaccacaactcccacattcattcttctttccctcctttacgaaagtccctgacttgcttgaaaatcacttcaactgaagtcaaaatcatcaggacggttccaatcggcagacacagataaggaatcgacataggaacgcctagtcccacagaaagattatttgctccagtctttaccaaatcaatagaatataccagtaaaaagcagaggaaaaccacacctatcaaagttgaaataactgtgctcagcattctccagcgcggcttcagcagatgaatcaatgcatcgatttgcagatggctatttcgtcgtataccaattgcagaagccagcatcacctgaaagataaataaataccgagccagttcctcgctccatgcggtagcatgtgcaaagacatagcgcaaaataacctgatagatcatgacaaccagcattactgctactgaaatgcatagcagcgctttttctattttttccacaatatctaaaaattttgaatatgccttcattttttcttttgcctcctgtcacagctgagacttagaacaaaaagcccgacagatgccgggcttttgtgtccatttcaagttgcggcaagggcctgctgccgccgacccagcggatacaaaccaatgcctgctacatgaaaactacgaattagccggatccattgccttgatgcggcccacccaatccgccaagttggggaagtttgtctctgcaaaggtatcaaagtaatctgcaaacgcttttgtatccacttcgatgacctcacagccctcatcgagaactttctgctccgcttcttggtctctctgcttctgaactgcgctgatttcctgaccagcgtactccgctgcctctatcactgcattctgaatctcctctgggaggctgttaaaataggtccggtccatcatgaaaaggttgcagctatatacatgattggttttgatccagtatttacagacttcatcaaaggaatagttcagagaatccgcaaaggggttttcctgtccctccacggtattctgctgcagtgcagtatatacctcgttcatagccagaggagtcggtgaggtattcagccactgccaagttttcaggtaaacctccagattgggtactctgagtttgaaacctttgaaatcatcaatggtctccattttctttgtagctgtgacaacgcggggaccacgataggctccgcccatcagtttaaatccagaagcttctccggctgcctcttttatttcatcccccagatcgctggaccatactgccatgaagtgatcagctccgctgtacatatatggcatagcgtcaatatttccaagttctgtaaatggggccagcactcccagagcttcacatatgatgtctgccacgccggcagacataccttccaagacttcggaggtactacccagactggctccaccataaaggtcgacctgaacctggccgcctgtcagttcctgaattttcttcgcaaaaagcactgcctgatcataacagttgtcaccctccgtggaatttagcgcacatttccacacatatgtggcttcctgcttttttccctctgaccctttctcactggcattattgcttccgcaggcactaagcatcggcaacagcataagtgctgcaagtaatccagcaaataatttctttttcataatgtcctcctgaaaataatctttccagtcgttgtatatcaaagcaatggcagcagacactgcgcagatttagtcagtgcaatgtcgccgctgggaaactgtaacacttccacactgacatagtcctcatagtccaccgcatgaagtgactgcatgattttcgggaaatccaatccgcagttcccgggatataggcgattgttatcacacagatgcacataggaaaaatatcctttactgcgttgaatttctttgaaaatgtccgcatcctggatattcatgtgaaatacatccaacataatccgaaaattttgatatcccacccggtctacgatgtctcggccttcagcggtagaattaataaaattgcactgtaggaagttgacgggctccaaagcgattgtaacacctttgtcctccgcataactggccaactggcgaaaggcatccacggcaagatctagagtcgtttccggcgggatccctggtactagttctccccgcacacggccaatattgacttgggcatgatagggagcagcacagtcgatgaattccttaaatcgtttgatgcaacgcaggcgattttcaggattcgaactacttaaagaaatatgatcctgtgcccatatctctcctgttgccaacatgacaacttccaaaccataggtgctagtcaatcggttgagcagttcgggatccaatttttgggggtcgcgaaccatcaattcgattccttggtatccattttccgctaagtgtcgaaaggagtcctccaaacttccctgataagctgtcagcaaaggactggattccaagtctggcatagctacctggtatgctagcttcataaacacacctcctatcctgttttagtatagggatgagcaaaacgcaagctttgcaaagccaatgcacaatatatagatagactttagtaagcccgatagtggcattattgtatagtctcatgagcaaatcaatattttgctcatccctatattttagaaacaagccttccttttatcggcacagaagcagtctgcgttcccgaactgtagacagaaccccgtcccatgcagtcaagaagccattatgaaacagctcaaaggccggatgtgaagaaaggtcagcggccaccagaccatctgcttcataggcacgtcggaaggccggaattttttctttaagctcttccaattcctccggactggccattgcatcgattcgactcagaatttcaggatttgtgcggttcatctcatcaatgaagttccaaccgcaggtaacatgcatatcaccaccgaccatttctgtgaaatgtctggcagctcggacgcctccccccatcaatttacagttaagcgtagaatacttttccttccaaatctgatagatttttttagacatttccgtccctgacttctcaaccaagtcgggagagatagaaatgtgattggcttccacatatttttttgcataattttcaaaaggagccgccaatgtggtcacaaacagcgtgggggccgaaccagcaatctgtactcctctggcatatgcctcaaacatctgtacagcatagtaattagaaacgcccgctgttgccaaaacacacctgccttcactggtcagcttttccatggctgcaatgccagctagcgttgctgaaaccttgacaacaatattgggggaaatttcatagaaacggtgagcttcctgcaggataaagtcaatgtcgtcatcccgatagggatttccctgaatggcgacccagcccttttcgccgccagtctcctgaaacaacggcaagaaaatctctgcgatttttgcgatcatttcctgataggccaacgccactactagatgatcatcctctgtcatccgcacatagcggtcgattgcgctgagcgctgcgtcctttgtctcctccgctttaagcatatgagaaagataggtggggttagaggttgctccaaaagttcccgcctcaagtcccttttttgcctcggaaggcgtcggattgttgacccacattctagtaggggtctgctcattgattcgttccagataggttttcatcggcttttccttgcatcctttctctttcatttttgaatttcgacatcagcgttgtaatgttgccatgttgtcatacagctcatggtcaaagtataacatctcttatgggaaaaagcaagcattttattgttgaaaatatacacaaagaagttgtatgcttatttgacaacttgactgggaatgatatataatacaatctatacttatcagcttaacgcagtcggacacaaaatgcagtggcggctcttgccatgcgcatgaagttctgatctccggtttttctacaattgaagcggaaacaagactcgtccagatacgcctgaagctgctggcagcgaccgtgattagattcccagtaaagatgacttttcagatgcaccctatatattgtaccttaattttgcaaggcttgcgttttgctcaaccctcaataaacgatattaggagaggattatgttaaaaccagttaatcacaacagtgcaagcagtcaaatctatgaacagcttctgcattatatcatctccggagagtggccggtaggaactcgccttccctcggaaaaagatttggcggagcagtttggcgtaagccgtgtccctattcgggaagccctccagcgcctgcgtgctattggggttgtacgttctctccaaggcagtggatcctttgtgtgcgggaattctcctttggaggcgatggaaaccattttgtcctgcaacgctgtttctcatgaacagatcgtggacttgttggagttccgaaagatttttgagccatactgtgtgcataaggtggcagaaaccgccaccaatcagcagctatttgaattggagaagtacgctccgtccttggaaagcatcaaagatcaaaacgatattcgaaccgtgacctttgaaatggatatagcatttcatcgcaacattgttctcctgaccaataattctctgtttatttccctttatgaagtaatcagcaaccttcgcctgagccatattgagtattttgtaggactgcgcatggaccatgaacgcattttggaagaacatcatgagatttatcgtgcattgatttgtagggatgcccaattggcagaaaaactgatgtacgatcatttgacccgtgtttccaacttcatgtaatctttgtataatttttctttgcaagttacttctaaaagaagctccgctttctatattatatgagggattccaagcttcaatcatggctggaatcccttgtagttactactctttttgagttttgctcatggctattactaataattacataggggttatggcaaagatttaccttatccgccattgcaaatccgagggcggtgcctgcagccgcgcgcaagtgcagactgatgtgctggttacgggacagcggaagacattgccaacgctgtcctcttctatgccagtgacctctcagattatatgaatgtcaacggcggactgtacatgtgagataacaccggcagttgtaccgttattcaacgctgaagaacgaaagcctctggaacagggacgaggagaatgtttgtggagaatatggtccgggcaacattgatctctaatgccggtcttttgctggaatatagggaagtgaagcttttggtggatgccatctaccataccacagatcccttcagcccccccgccagccgcgtggtccgcaatgctggccggagagcccccttttgacggtgtggatacgttgctgtttacccacggtcatccggatcacttttccccggagcgcctgatgcagtaccttcggtatcgtacggtcagacaggtagtgcttcctgttatggagccccagcattgggaaatcctgcagccattcttggaagagcggagaatccagtggactctgcttacagcacggatgcagacggcggactttcaaattccgggagggaccgttattcgaccctattttacccggcatattgataaagccttttggaatatgccgcatggctgctatttgatctccttcggcgaaaaacatgtcttgctgacagctgatgtggattatacaatagaaacctttgaacagatttcgtgtgttcacataaatgcggcgtttgttaatccactcttttcaatgcacttcgaaccggaacatttttaagggcacactgcagccagatcttctctgcgtctatcatatcccttttcaggaggatgaccggtggcaaatttgctcgatgctatcgcacaatttgcaccggtggaatcaagagcaagggaaggttgccatcttgagtgggccgtaccaatatgtggaattttagcggcaggagcgaacattatgaatcatccggtattttacttgaaaacgggttctcagaacccataagaattcgtcctaacgcaccgcgtggagggagactatctaatcctttggcagaatgacaataccatcgtcatcgggcaaaatcaaaatagcgaagaggaaatcaaccgcagctttgtagaagcacatcagattcatgtggttcgaagatctaccggcggaggcgctgtgtatcatgatcttgggaatttaaactattccttcatcaccgatgccggggaggatattaggaaacggcgatggagacaccctaaccggccatccgaaccaccagactgcggtaagaatccggatccttccgcgccgccaacaacacggaattatccacaatattgaactgccaatggaagcagccctgagccgcaaacgcccgtagcagttgctctgcaagacatccatctggcgtggctccgcaggcgttgcccaacccacctgcgcactgacagaataaagtgctggccagaattgccccttggaattttcgaaccgctccaactgatttgcaaacatgtccgtaatttcaacagccagtatgtcaacacggtcaacatcgtttccaaattttggaatacggtttaaaatgaattgccgcagtggctctcgatcccggaagttatccttcagaatccgagcaaactcattcagtgtcaatctttggcctcggtataccaactgccggacggcctccaaagaatccactaccgttgccgtgccgacagcaaccaatccagttgtattatagtgcgctccgccattcgtacagtcacgcccgttggcaacgcaatcgtcccaaaacagactgacaaaaggaagaggcaaaagctccttatgaattccatctgtgatattcgtctcttcaacctgtagggcgatcccctgttggaaatagctgtagaagcgattcatcaattgccgaaaagatttcggctctgcatcgtctgggtggaacatggagacgccagatttcgggtccgttccgtttcccagagtcaactctaaaactttcggcaagttgatatagccgccattgcaccgcgcccaatggccatgcacagagatttcatcacaacctacagcgatatagtcccgtgcctcctgaagaggaatgccgcaggtgctgaatgatgactgcatcattcagcacctgcggcattccatttccacaagcaatgctgccaactgcatgatccaaaaactcctgaggtgtccccgcgtgtagtcgtattgtaaaattgggctgatgcagttggatatgtctgtttgcatttagacagaggtaagacagaagatttgtgcagtcatgaccgccgcggtcaacccctcctacttcaatattctgccctgccacataatagcccgcgttgacctcggccgcgtctctgctgtccacccgcagaatctcgcagaattttagccagagcaggtcaaggagttcttgcgcctgttccaatgtgatcgtgcctgctgccaaatccgctttcagatagggccagcaatactggtccaaccgtccgaggctgatagagaatccgtttgattcgatctgaggaatcaactgcattagccaaaccatctgcaatgcttcatggaaagatgacgcaggctgcgcaggcacgcgggccaggacgcggctaattgcggtcaattccacctttctgcacggatccttctcctgcacggccattttcttctccagtctgcggtagcgctccgcaaaaacaagcacaccgacacaaacctcttcctcggcatcataaaaagccaattttccatcatacgcgggatcagatcggtttagtgtatcccgttgttttctcaccctttccaacattccgttaattccaaattgaagcagttgctgataattcattgccacatgcgcaaaaccgctcccctcatgaggatcagacaacagtccgcagacgtaggcgttctgaattgccgctgttctctgcctcatcaaataatcgtgcggtgtattccctttccaaaacggagcaatttccaacaggctcgcccgtacctctggtctaactcgtagccgattgtacttccgggtttcaaactggtcgatctcatccgtaaaattgatattcacttccggaaatacctccgcagagcgtggacgagaagctgagtgtccaacgatgacctcctggggctgaatgaagattgggagttcttccaatgtcctgcacaaagcctttgctctcagcaaaatcgtgggacatctcccggacaggtttcggtacacctctgtataaataatggctctctgacagcacatttctggattctcttccaaaaacatctcttttgctttaataacccgttctgttggctttgcggggagcctattgatgtcaaaatcagccatttttcagatagatcctttcctttttcgagtcaccaaaactaaaaccacaggcaacatacattaaaaccatgcgcttttgaaatataacgttttttgttatgattgttttaacatccgcatttgctgctgtcaaggtaaaatgcaagcctcaccccacaaatgctcccttttgcgctggctatattgcacaatctgcaccatggatatacagatacttgtcagaaaattaaccatattgtcttgctcttaacataaaattgacctcgtcttattttatcataaatgaagtgttttttcaaaatcatcttgacacgctcaatgtatgttgttataatcatgtcaaaaatatgatatataacaaattctaaacggaatatatatcatcataaatcataacaacatgtggagggtgcaaacatggcaacagtagttatcatgccccggcagggacaatccgtggaaagctgcgtcattaccagctgggccaaaaaggttggggacccggttcataccggcgagaccctatttagttacgaaactgacaaagccgccttcgatgaggaggccaaagtagacggcacactgcttgcagtattttatcaggagcaggacgacgtgccttgcctttctgaagtggcggtgatcggcacccccggagaggatatctccgctttcggtcctcatgcagatgtgtcgcccgctgcgccggaaacggcgcaggcagctactcccgcggtggcagccgcgcccatggccgtacaactcactgctcccacagcggctgccggtgtatccctcgggctagagtggccgcagagcggctccatgtggatttgaccggtgtgacccccactggtcctcatggccgtattctggagcgggatgtgctggcagccggccgcagtacctctgccgcagtggcagccggttctacagctggtataccgggaactgggttaggcggccgggtcacgctggccgatcagcaggctcctgccgccgtcgcgtccgagacatcctccgttctgggatatcacgatgaaaagatctcccacatgcggaagatcattgcggattccatgcacaattctctggctaccatggcgcagctcacccatcatagttcctttgacgccagcagcatcatcgcataccgcaaggaattgaaagccgccgaatctctggagcttcccggcattacctataatgatctgatactctatgcagtctcccgtgttttgaagcatcatcctgttctgaatgcccactggatggatgataagatccgttactttgaccacgttcacctgggcatggcggtggatacgccgagagggttgctggttcccacgattttcaatgcggataccaagtccctggcggaaatcgccaaggaaaccaaagaattggctgctgccgcccagggaggctccattagtccggacctgttgagcggtgccacattcacggtatccaatctgggaacactggatatcgagatgttcacccctgtgatcaatcctccccaaaccggcattctgggcgttgactgcatggtggaccgggtccgtatggccgacgggcacatttccgtttatcccgccatgggcctctccctgacctatgaccaccgagccatggatggcgcaccggcctctcgcttcctgaaagagctcaaaacagttctggaacatttttccgcactgctggcggagtgaattaaggagtgcataggatggaatatgatattattgttttaggcggcggccccggcggatatctggccgctgagcgggcgggacaggcccaaaaaaaggttctgtgcatcgaagaggcccatttgggcggcacctgtcttaatgagggctgcatccctaccaaaaccctgctgtatagcggcaaactgtatgcccatgccaagcacagtcaggcctacggtgtccatgccaaagatgttacactggatcacagcgccgttattgaccgaaaagagcaggtgatccgcacgctggtgggcggtgtgggcgctacactgaaagcctgtcatgtggatgttgtggacgcaaaaggcgtcatcaccggccgcaccgccgatggctgtactgttgaagccggcggtcaaacctatacagctaagaatctcattattgccactgggtcttcctgcgccgttcctcccattcccggcttgaaggaaggacttgcctccggcttcgtgctgactaaccgggaaatgttggcactgcgggagcttcctcaacatctggtggtgcttggcggcggtgtcatcggtctggaaatggcaacttattacgccatggcagatgtagacacgacagtcgtagaaatgcaggatcatatcggcggccccagtgaccgtgacatggtgaaaattcttcagaaaaactgtgaggcagagggcatgcacttcctgctgaacgccaaggttacagagatccgggagggctccgttatctatgagcaaggaggaaaaacctgcacactccctgctgataaggtgcttttgtccattggccgtaaacccaacaccgcaggcattggccttgaaaatgtcggtgtgctgacagagcggggcgctattgtcacagacgagcggatgcagaccaatgtacctggtatctatgccgtaggcgatgccaatggcaaagccatgctggcccataccgcatatcgggaagcggaggtcgctgtcaacaatattctcggaaaacgcgaccgaatgcgctatcaggcgattcccagcgtcctatatacagtgccggagctcagcagcgtaggtgagacagaggaatccgccaaagcgaagggctacgatgttaaggttgtcaagctgcctatgagctacagcggccgctatgtggcggaaaaccagggtggcgacggcatctgcaagctggtcttcgataaacgaacaaagactcttctgggtgcccaggcgctggcaaattactcgtctgagttcatcattgctgcaggcatctgtatggagctggagttgactgtggcggatatgaaggaaattgtgttcccgcatcccactgtggcggagatcctgcgggaagccatctgcaaatattgagccggcataacggcagaaggagagctgaaagatgtctaagcagttatttgtggaccccagagaaatgcgggcacccggcaaaattgagtttactgacattctggaaaatcagtaccagaaaaccgttaaggacgaagtcggaaacttccccagagaggatctgatccgaatctatcgggatatgtgctatatccgggaatttgaaaccatgatccaactcatcaaaaccactggtgagtatcagggcgttccctacaatcaccccggcccggctcatttgggtatcggacaagaggccgcttatgtaggtcaggcctaccacctgtccattaacgacttctcctttggctctcaccggagccacggcgaaattttggcccggggcctgcgagccgtagaaactctgccggaagaacagctccgctccattatggaggactttgatggtggaaaaatcctcagagttctgggaaacagccagctggatatccgggcgctgggccgggacttcctgctttacggcatgacctgtgagacctttggccgggaaaacggctttaaccgtggtttgggcggcagcatgcacgctttcttcacccccttcggcatctatcccaacaatgctatcgtaggcggctccggctctatcgcgcccggtgcggccctctataaactctccaaccacaaagacggcatcgttgtctgcaacattggtgatgcggccaccgcctgcggtcccgtttgggagggcatggtcttcagctccatggatcagatccgcaccctctggggcgatgagttcaccggtatgccgattctgttcaatatttggaacaacagctacggtatgggaggtcagaccaacggtgagaccatgggctatcagactcccgctcggatcggcgccggcctgctgcccagccagatgtacgctgagcgtgtggacggctacaatccgctggctgttatcgatgcttatgcccggaaaaaggacattatcaagcagcacggccctgccctgctggatgtagtgacctaccgcatttccggccactccccctccgactccagcagttaccgcaccaaggaggagattgaggcctgggaggcccaggattctattctggcttacggaaagcaactgatggaagctggtctttgcacgcaggcagacttagaggctattcgtactggcgtggcggcggatatgcttcgaaatatgaaactggccattgacgagactgtttccccccgcattgatgtgtttggaaaaaaaccaaatgctatcggtgaactgatgttctccaatcagactgtccgctccatggatgaaaatcgcaaagcggaaaccctgctgccctatgaggaatcccctcgggcacaggccatcgccaaaaaggtccgcaaggggctggatgaaaaggggaaccctgtcagcaagaacaaggtctatcagatccgggatgccattgcggagcccattctaaagaaattttacgaggatcccactctcattgctttcggcgaagacgttcgggactggggcggtgcttatgcggtctaccgcggcttcacggaaacacttccctatcaccgtctattcaactctcccattagtgaagcggccattgtgggtgcagccgttggctatgccatgagcggcggtcgtgtggtagcggagatcatgtacgctgatttcctcggccgcgccggcgatgaactgttcaaccaactgtccaagtggcagagtatgagcgccggtgtgctgcggatgccggtggtgattcgaatgagtgtaggttccaagtacggtgcccagcactctcaggactggtccgccctgtgtgcccatatccccggcctgaaggtagtcttccccgctacgccttatgacgccaagggtatgatgcagtcagcactgaacggcaccgaccctgtcatctttttggaaagccagcggatctatgacatgggcgaacgtttccacccagagggcgttcccgaggaggaatacgaaatcacgctgggtgagccggacgtaaaacgctgcggcacggacgtcaccatcctctccattggagcaacactgtatcgcgccatagaggccgccgatattctccagaatcagtatggcgtttccgccgaggtcatcgatgcccgttccctggtccccttccagtatgaaaaggtcatcgaatccgtgaagaaaacaggccgcatcgtcgtcaccggcgacgcctgtgaacgcaattctttcatgcgcaatctggcatccaacatcacggagcttgctttcgattatctggatgcgcccccggtcgtcgtgggtgcgaagaactggatcacccccgcccacgaacttgaggagtgcttcttcccccagccctcctggatcgtggatgccatccatgagcggatcctgccgcttcccggccatgtctgcagccacaactgcacggaactggagcagctgcgcgaaaacaagtacggcatctgattttcttccccaaattcaaaccatttttctcttcctttcatatagcgatgggaagcagtacccattacggtactgcttcccatcgcttataacgaaacccgccagatagactctggcgggttccgcggctttaccagtattatctgtatttgtgcgcaaacagctccttcatgatcgcactgcgctcctctggggtcaatccatcgttgacgctgaatacacggacattgtgcgcctctgcctctctcacaaattcaggcgtgagcatactgtcccccaccagtacatctacatcgtccagcgatgcaaaggtgaagggatggctccgtccgatctttccacaatccatcagcatcattgtgcaggctgctttccgaatcacccgctgcttcagctgtgcctcctgtaatgaaccgcttgtaaaaccaccattaaaggaatagccggaggcagccatgatcgccacatcaatgttcatgccatccagcatctgctcagcctgcggtccggagcatgaaagcgtcacgccgctgacctgtccccctaaaagtgtaatattgtagcgattcttctgtgccagctctgccgctgtgttggccgcgctggtgaccactgtatagctgccctcatgcagaaaataggtcagcgtcagaattgtggaccccgcgtccaaataatatgcatggcccggatataccagatctgcggcaatcctggcaatgtcttcttttgcagagacattctgctttgcgcggcaggtaaaattcgcttcttgtccggccatggggctctgggcagcaatcgcaccgccgcggacgcggatgatccgtccttcctgctccagcttggtcaaatccctccagagcgtcatcatggaacagtccccgatcaaagactgcagcgccgtattttttgcctcaccatgctccgtaatataggtaaggattgacatttgtcgttcatttaacatgaataaacctcaactttaaagaatcatttccccgtatatcgaatctcaagaggatgcgtccctataaatgccagcagcgttttcagatcccgaatgcccgtattggcaccgacacattgaataacgtgcgcggaagcagcggcccccaggcgaacacagtcctccatggacccgttccgcaagacgccgctgagaaagcctgccacaaacgcgtctcccgcaccggtagtctccactaccggaacatcgtagcagccgcagtaaaaggacagctgcgccgttttgcagaagcagccccggcttcccagcttgattaccacacatttcacgccgcccttcaggaagaaatccgccatggcttccacatcttccgtgcccgccaacagcatcgcctgctcctcactgggaagaaaataatccaagtaaggataacatggggataatatttcattccaccgtcctgttgggtctttagtcacatccatggacgtaatcacaccgatttcctgcgccattttcaacagcgaagcggccccgttggctccgtcaaagttgggcagatggaaggtgctgcttagttggagaattttgcactgccgcaatagggagagatccacatccgccgaagtaaactcccttgaaacaccgggaaagtaatagaatgcccggtttccctcctcgtcaatgaggatattcattttaccatgtggagtctctgaccggattgtgtggctcatatcaactcccgccctagtgcagatatccataatataattcccgcacacatccgacccaatgcggcccacataggttacggagttcccaatcactgccagatctacagaattgttcagcgcatcaccgccggtcttcagcaaaatctcctgtacattggtactatcgttgttaaaaaaggtgttagatacggggtgggtgataatatctactagagtttctccaatacacaaaacgtccatatttcatgcactcctaacgctagtttaatactgattccttcaaactttttcaaacatttctcggatattctcatgtcaaaaggcacaaatcatccttgctgacgcataaatccgcttttccaaaaaagaacgccccacagtcctttcaaaacagtaacggtggcaacgcccacaactgtcaatagtcatacaattatggctaattataacattttaatgttaattagtcaacattcaccacctgttttgttaattttgttagcgttcgtcaggaaaactgttagtgtcgggaattcgtgcccccgttttttgtcgggagcaacgaaccgctttttgtcgcaaaaccggaagctaatcgatagaatttcatagtaccaacaacccaaaatagcaaataagtattattatttttgccggtcagccagcagctcaacggcctttactttgccagtcgtatagaaactgtatccagctttttcctgcggaagctctcgccccgcagtttgaatcgcagcctcatcaatgatgcggtccagcgcacacagaagagtattgacgaatggcttctgcaccctttgaaagaaacggaagatagggacttattggaaatcgtggagtcccggtacaagcgaaactccacgatcttctgttcccagtttgacattccgggctggccgtaaaagttgtctgacccgctgctggctgatgccatctgcgaccgaatcgtccacgatgcctacgccataatcattggcggaaaagaatccatgcgtaagcggaagggtctgcaagacatctgactccggccatatttaatgtgcactgaataatagaaaaagccttgtagctgattcattctgaagccagtgaaatgaaataaccgcccaatcagcgcaaaaagtcttcgctgtcagagtgacatggagcaaggcagaaatcgtcctatagaatcataattgctaacatcattgaaagtccctgccgcctatggcggcattgacgcaagcatagcgtttgtatgacaaacgcgcttgctggggtaaaccccagtcccccatgccgcctgcgggcggaaacctttcggcagcattgccggaaagtagcatataaaatcgggttcggccatattgccaaacccgattgcaacgaggtctatagagattgaatttcctgcaatatgactggaaatctgctcgcaaagacaaagtcgatatgaggaaggattgacagaattgtcattccttccttacctgtttctatcgctcaaaagcgcttcagacaacattgtcaaaagcggtagacgctgaaaaccgggttcggtgaattcaccgaacccggtcagactttttgacaaggttgtctgaaagtaagggttggcaatcttgccaacccttactttaccagatcgtctcccgcaccgctcgaatcagcgtcaccacccatgacagcgccgcaagacccaccagcacaaggaaaatgccgtccgccagagcggtatgggccagataccacgggcggaataccgtgatgaccagtgcaccgtacagcagcggcgcagacaaccgtagcacctgtgccagacggacgatcccgtccagcagcgccagccccaatgataaaacagcatacatcatgttccgagcctccttcttcgatttgcggtatgttaccatcggcagacagactttacaacagcctgtctgccaatttttttcaccttgggtgtcaataagacacccaaggttggacggcgagggtgtctattgcacacccttgaccttaaatcttttacaggagcttttgattccggggtattcatcacgctgttttttcgggaggggtagtgagggggcatctgaaaaaacagaaaaccgctctcggcaacattgccggaagcggtttagaagttcaaagccgttggtaaacactcacccgttcgccccgtgccgccccgtgcggcgttcttccgtaatgggcagtgtccttgcccatcccctccggcagaggccccacaggcggcgtgtgggcaaacttagtaaacaatagaaaaaggagagcctatggagcaaaaagccaatatcaccatcaataaggagcatatcaccgtggagcggacgcagacagcctgcgggcgggagattcaagtcatctccgtgtttccccggcatggcagcgaaaccgtggaggacaagctgaaagccctggcagaactggactttcagcagggaaagctgtgtgcgtaaagtgctggacaattcaaaccgttcggggtattgtggtgtcgcaatgctctgaacggtttgacaaagaaaaggaggactgtatgaatcagtcaaaccaaatcaggaaaaccgctctttactgccgtctcagccaggacgatgggatagagggcgattcgaactcgatccagaatcaaaaagccattttacagaagttcgcggaagatcaccatttccccagcccctgcttctatgtggatgacggtttttcgggaggaaccttccaaagaccggcgttccagaagatgatctcagacatggaaaacggcgagattgggatcattgtgaccaaggatctcagtcgcctcggtagaaatcagcttcacacgggactctacatcgaggaacgcttccccatgttcggcgtccgctacattgccatcaatgacaatgtggacaccgacagcagcgagagcaacgacctcatgccgttcaagaatttgttcaacgagtggtttattcgggacaccagccggaagatccgtgcggtgctgaaggccaaagcggaacggggcgaacggctggggaccagagcgccttacggctaccgaaaggacccaggcacaaaaaaactaatcgtggatgatgaggcggcagctattgtccgcaggatctttgccatgtgcgccagcggcagtggccccagccaaattgcccgcattctcaagaaagagcagatcctgacgcccaccatgtacgcctacaccaggtacggcatcacgcacacctgtctggatacagcacatccgtataactggtctgacagcgccattgccaatcttctggagaacgagatctatctgggcaataccatcaacatgaagcacagcagcagatcctacaaggacaagcgaagggtcgaacatccaagagaggaatgcctggtctttgagaacacccatcccgccatcattacgcgggaggtctgggacgtggtacagagagtccgtaagaacaagcgccgtctgacaaagatggaagaacaaaacaagtattccggtcttgtgttctgtgctgactgcggctccaacatggtgctgcaccgggcacataccatgtccgccagctacaatcactttacctgccgcacctacaagaaagatggcgaagcctgtacgggccactacatccgggagtgcgttctggatgaggtggtgctggaggacttacggagagtaacggccatggcacgggaacatccggaaaagtttgccgcctatatcggcagcaggcagtccaccgaacttcagcgggagatccgcaggcaggagaaagaactggccgccatgcggaagcggaaagctgaactggacaccatcttcaagaagctgtatgaggatagcgtgctgggccgtatcaccacagagcagttccagatgctttccggcagctatacggaagagcagaatcaaatcgccgcaggtatcccgcagaaagagatggacatccaacgcctgcgagaaacggtgagcgggacggacggtttcctcgatagggcaaagcggtacacggacattgcggagctgacgctggaactgctgcggctgtttattgagaagatcgtggttcacgagaaagaggtaaagtggtctaagcacgcaccgcagaccgtggagatctactacaacggcattggctatgtcggcagtggtcggcaggatgtggaagaagcaccggaagcgccggaaccccagcaaacccaggacacagagaagccccggcaggcatcgtaaacacgatgacctgccggggtatcccaggaatcacttgttacccctgtgaggggagagcgaatgcctccgcgggtttttcctttcctcagaagagggccaggagctcttccagggcagctttcgcgtccgctccgctgtccctgcccggagatacggcatcgagggtataaagcccgttcttcaaaacaaaataggcgtctgcactagaaaagtcattgtagtaatcgctttccggggtctcggataccaccaatgtataaggaataccctcaccagtcacaccggaggtaatttcaaattccgcttccccgttccagctgccccctgtcccgggctccatgccgcttccctccggataaagcgaaactgtcatttgaatgcggatcggccccatgagatagccggtatctattgtcacgtgctgcagctcgcctttaatatttccttgcaaagcaaccgcgcaatggcgttggctctcttcattcagggtctccgcatcctgcgcgatggcgaagtagttggctgtctccagcaggctggacttctccaagggattgttcagagggaacccgataaactcctcacagtctgcccagcggtcaaaggtgcgaagccaatatcctggactggaattcaaatagagatcctgctcttccattttctgtgaaacatcctccatagcagacgcgacctcatccgaaaagctctccaaagggatcacgggaatctctccgtttacccgatagctggaactttcctgtcccaccagaacatcttccacccggacattccaaaaatccatggacaccgccgtcgctgccagcagcaccgctacgatggccgctaggatcagcacccgcttccccagccgccgttttccgggccggtccagggtgcccccctggcggatctgttcctccagcccgtccatagccgactcataggctgcgggcagggcccagtcctcccgctttgccattgcccgcaggcgggcgtccagctcatccatagtctccctccttcaagatgctccgcagcttctcacgtgcccggctcagccggacccgcaccgcccccggggacgtccccacgatccgggcgatctcctctgtgggcaggtcctcatagtagaacagcaccaccgcctcccgctggtctcgtggcaaggtctgcaccgcctgccaaagggtatcgtcccccgtctcccggcccggtattgccggttccgtgggcagatcatccaaagagactgtccggcctcgccgttggcagagacgccgggcctcattggcggtgatcttcagcagccaccggggcagcttctccttttcccgcagctgaggataccgctcataggcccggcagactgcctctgccaccgcctcctgggcatcgctgctgttccgggtgatactgaaagccagacggtacaggctggtccggctgtgatgcagcacttggcagaaccgctcccgctcttgctccggcagcgtcatgtccttccccccccttctcctgttctgcctgtatgacccagcagcgtggcaaaatgttacggtgtactcgcaaaaaagccgcctcgcaatgaggcggctcatattcgcttcacagcgggacgccgaggcccagccacaggacgttccggaccacgcagttggccaggaacagccccactaggaccatcggccagcggcggtcatagcgcaggacccagccccgctttccccgcagccgccacgcggtttgagaaaacagatagatcgctgccagggccagcgtgatcaccaccggcgtgtggtaccagagagccgcgcccacccgtccctgggctagggccatcagcgcccgtgtccctccgcagcccgggcagtagacatgccagtgctcccagacccagcagcggctgacagtgggtgcccccagcgcaaagcgccatagcagatatagcaacaccagaaccgccagggtgatccaggcggtcggataggcctcccggtctgtcatagaacctctctgcataaaatttcctccctgtaaacagcaaaaaggccgcgcagcgcgcggccctttctcctttacttcagcaaccggatctgtcccagcagaggaactgccttctcctctccattgacagcggagatgaagcccatcaccgcgcagatgaagcaaaaaatgccccacagccagccgatacatggaatgaagctcagcagccccgccagccagatcaccagcgcttgattcagatggaatttcgcgccctcccggtcgcccagtacaaaggcaatcaccagaccgatccaggtaatataagcgacaatacccgtcgtttttgcatccataaaaacacctctctttggttcagtggggttgtccatagtgtaccacggttttggaaagaatacaagcccgcgtcaggactcctccggcagaagcgggctgtacatcatgatggcgtcatttgcaaagaggaattcctcttccagcaggcccccctccaggtcatagatgcggcggtacagctcgttatgccgcacatatccgccccaggatgcctggtccatccggtggttcctctctacgatctcatagcggcagaccggaggtgccggggcccgccactctcccttcagaacctgctttcccacctggacacagagctggaagggctgttccgtgtcgttgcggatcatcagatcccggtggggataggcgcaggtggcgccgctgccgaagggctgggtccggttggtatccggaaagacatcgtgagagtgacggtaccgctccactaccgtcagcggcgtgtggagagtcatccagaaaatcagattggagagctggcacagcccgcctcccacatcgctgccgatccggcctagaaacagcaccatcccgtctcgatagcccttccggcgggtgggctttccgatcagccgccaatagctgaaggtctcgccgggatacaggacaatcccatccagccgggccactgcaagccggagattagccaccttgttttcctggagttcctgatcctcccctcgcagatggcggtacaagggtgtggcgtgtgaaatcagcatatacggcaggcgctccgtctgacgctgtttggcccagtgaaaccggggcgacatccacagaagacggcgccgtccgccgtaatagagttttcccagacgcaaacgcagccagctgcggtgaatgggcggccagagctgtcgattattgggatctaccatgggacctcctccctatttcccagaccgttcgcaaataaagacgaaatcagaacctaaaacgattttaaagtgttcggtcccataaatcctcacaaaactgttacaaacaataacaaaaaagagacagtcaattgactgtctctcagtgttggcgctacctatcttcccgggccgtcaccagccaagtattgtcagcaggaacgagcttaactgccgtgttcggaatgggaacgggtggaccctcgccctaatcagcaccaactctatgtcatccggtcttgccggagaacaaactgtattatattgtatttcgcttcccttgtcaagaactttcgcccttgaaaagtctggtgacccgtaccggattcgaaccgatgttaacggcgtgagaggccgctgtcttaaccacttgaccaacgggccatggtgcaccttcacggactcgaaccggggacccactgattaagagtcagttgctctaccaactgagctaaaggtgcaaatcccttgagcatgcttccctgcaccctcaaaaccgaacaatgtgacgctgctttcaggctcgcctgctttctcgtaggtcaagccctcgggctattagtaccggtcagctccatacattactgcacttccacctccggcctatctaccaggtagtcttcctgggcccttaccctctttcgaggtgagagatctcatcttagggggagtttcacgcttagatgctttcagcgtttatctcgtccgtacttagctacccagctatgcccttggcaggacaactggtgcaccagaggtacgtccatcccggtcctctcgtactaaggacagctcccttcaaatctcttccgcccgcaacagatagggaccgaactgtctcacgacgttctgaacccagctcgcgtgccactttaatcggcgaacagccgaacccttgggaccgaattcagccccaggatgtgacgagccgacatcgaggtgccaaacctccccgtcgctgtggacgcttgggggagatcagcctgttatccccagggtagcttttatccgttgagcgatggcatttccactcacataccaccggatcactaactccaactttcgttactgctcgacccgtcggtctcgcagttaggctggcttctacgtttacactcactgcacgatttccgtccgtgctgagccaacctttgagcgcctccgttactctttaggaggcgaccgccccagtcaaactgcccgcctaacagtgtcccccgaccggattcacggccgcaggttagaaattcagcaatccaagagtggtatcccaccggcggctccacaagagctgacgcccctgcttccaagcctcccacctatcctgtacatgggttaccgaattccagtattaagctgcagtaaagctccatggggtctttccgtctagttgcgggtaactggtatcttcaccagtactacaatttcgccgggcgggctgttgagacagtgcccaaatcattacgcctttcgtgcgggtcagaacttacctgacaaggaatttcgctaccttaggaccgttatagttacggccgccgtttaccggggcttcaattcaatgcttcgcttgcgctgacatctcctcttaaccttccggcaccgggcaggcgtcagcccatatacgtcatctttcgatttagcatagacctgtgtttttggtaaacagttgcttgggccttttcactgcggcctcttgcgaggctccccttattccgaagttacggggtcaacttgccgagttccttaacaacccttctcccgttggccttaggattctctcctcatctacctgtgtcggtttgcggtacgggcaccttagtatccatcagagcttttctcgcctctcagcatcgcggacttcgctactatattttcgctccctttcgcccgggtcaaccaacgcccgggttccgctatccaaaagtgtccctctgacttaaagttcggtggctacggaatttctaccgtatgtgcatcgactacgcctttcggcctcgccttagctcccggcttaccttgggcggacgaaccttccccaagaaaccttagattttcggccattatgattcccacataattctcgctactcattccggcattctcacttccatgcagtccaccgctgcttccgctgcgacttcaccccacatggaacgctcccctaccactgtcttacgacaatcctaagcttcggttagatgcttagccccgttacattttccgcgcagagtcactcgaccagtgagctattacgcactcttttaatgagtggctgcttctaagccaacatcctggttgttttcgcaactccacatcgttttccacttagcatctattcgggaccttagctgtaggtctgggctgtttcccttttgacaatgaaacttatctcacactgtctgactgctatgcatcaattagccggcattcttagtttgataggcgttggtaaccttatcggccccgctaccattcagtgctttacctccggtaatctaacataacgctagccctaaagctatttcggggagaaccagctatctccgagttcgattggaatttcaccgctacccacaagtcatccgccaccattgcaacgggggtcggttcggtcctccatggggtttcacccccacttcaacctgctcatgggtaggtcacccggtttcgggtctatggcaacgaactttacgccctattcagactcgctctcgcttcgcctccggcactgaatgccttaagctcgctcgttactataactcgccggaccgttctacaaaaagtacgccatcacacgttaacgtgctttgacagcttgtaagcacaaggtttcaggttctctttcactcccctcccggggtccttttcacctttccctcacggtactgctcctctatcggtcatcaggtagtatttaggcttggagggtggtcccccctgtttcccacggggtttcacgtgtcccgcggtactctggattcagtcgcacggccttctctttcggatacggggctctcaccctctatggcgggccttcccagacccttctcctagataacttccgctaaatgactgtccgcaaccccgaggaataaatccctcggtttggcctcttccgcgttcgctcgccactacttgcggaatctcggttgatgtctcttcctcgccctacttagatgtttcagttcaggcggttcccttcctacgcctattttgttcaacgcaggatgactggatattgtccagccgggttgccccattcggatatccccggatcaatggatatttgctcctccccgaggcttttcgcagcttgtcacgtccttcttcggctcctgatgccaaggcattccccttgcgctctttccagcttgacctatcgccgttctcacagcgacttgtcagagaattcttggttctctttgagaattatgcaggctttacaaagatcgaaattgtatgtcaccctgcatcctttcggatgctgttccacaatcaatttgtttcctctgtgtctccacagagaaacctctctgttgccttacttgcttttgtcacattgttcagttttcaaggtgcagatcgccgtccgcaagctttcgcttgtctccggcacagcttccaaccgcttttgcagtcagatttgaagatccgatctttcgatcaggtcttcaaatccaaaggcaaatcgcctggtgggcccgagtgggctcgaaccaccgaccttacgattatcagtcgtacgctctagccagctgagctacgggccctcgtcttggacgaggtgacgctttattctcttggtggagatagtcgggttcgaaccggcgacctcctgcttgcaaggcaggcgctctcccagctgagctatatccccttctatctcccggcgtacgccctctaaattaaacaacgtaactctttttccgctccagctgaccaggaattccaggcagagcttgctctgcccaggtctccttagaaaggaggtgatccagccgcaccttccgatacggctaccttgttacgacttcaccccaattatcgaacccaccttcggccgcgccctccttgcggttaggctacggacttcgggtgttcccgactctcatggtgtgacgggcggtgtgtacaaggcccgggaacgtattcaccgcggcatgctgatccgcgattactagcgattccgacttcacgcaggcgggttgcagcctgcgatccgaactgggacggcttttgggggtttgctctgcctcgcggctttgcctccctctgttgaccgccattgtattacgtgtgtagcccaggacataaggggcatgatgatttgacgtcgtccccaccttcctccgttttgtcaacggcagtctcgctagagtgctcttgcgtagcaactaacaataggggttgcgctcgttgcgggacttaacccaacatctcacgacacgagctgacgacaaccatgcaccacctgtctctactttccccgaagggcacctgatgtatctctacttcgttagtaggatgtcaagccctggtaaggttcttcgcgttgcttcgaattaaaccacataatccaccgcttgtgcgggcccccgtcaattcctttgagtttcaaccttgcgatcgtactccccaggtgggatacttattgtgttaactgcggcacgcagggggtcagtccccgcacacctagtatccatcgtttacagcgtggactaccagggtatctaatcctgtttgctccccacgctttcgcgcctcaccgtcagttgccgtccagttatccgccttcgccactggtgttcttccttatatctacgcatttcaccgctacacaaggaattccgataacctctccggtactcaagacctacagtttcaaatgcagtttggaggttaagcctccagatttcacatctgacttgccggcccggctgcacgccctttacacccagtaaatccggacaacgcttgccacctacgtattaccgcggctgctggcacgtagttagccgtggcttattcgtcaggtaccgtcttctactcttccctgacaaaagaagtttacaacccgaaagccttcttccttcacgcggcgttgctgggtcagacttgcgtccattgcccaatattccccactgctgcctcccgtaggagtctgggccgtatctcagtcccaatgtggccggtcaacctctcagtccggctactgatcgtcgccatggtgggccgttaccccaccatctagctaatcagacgcgaggccatcttccagcgataaaatctttgacatgcccgggatgccccggtcatgcgtcatgcggtattagcagtcgtttccaactgttgtccccctctggaaggcaggttcctcacgcgttactcaccagtccgccactaagcattcctatcatttggccgaaacctcagtcaagggtgctccgttcgacttgcatgtgttaagcacgccgccagcgttcgtcctgagccaggatcaaactctctataaaatggtatctaaacgaaccgtagtccgttcaaaccttcatagagctatttgtcatagcttcatttctccatcccaccggtaattgactcaacccagtgagacggctttgtcctttggcaaactcatctaaatgagctcgccttctggtgcttccttttcgttacgttgtttaatttacaaggtgcacgccgttcccggcggtgagatttactttaccacaaagttcttactttgtcaacacattttttcaagttttttcttgaagctctgcgttttggtgtttcactctcacgcccgacagcttagttagaataccagagcttgccagaaaagtcaaccctcttcttctgcttttgttcatttttttctcttgttttccggattcaccttctttttcgtgcttaataagtactcaaactgatgagactccttctatcataagttatacttattgttaatattgatttaacacgcttcttttgtcgattttatccagtttaaataaagctgcgaaaaagagacgcgggtttgattcccgcgtctcttccctcatcgcagcagcagcggctgtatctgttcgcctcgcagagcggcttccaccgtctccgggattttggagaagtccgccaccagggaactgggtttcgcccgggcgttgtcctgcccgaagggaacgaaatagtagttcttccgcaccagcagttccccgatattccgggcgccagccgccaggccgtcgttgctggccatggcaatcaccaccggcctcccgttccgcagatgggccttggccgccatcgtaaccgccgtatccgtgatgcccgccgccagcttggctatggtattccccgtagccggggcgatcaccagaacatccagcagccccttgggaccgatgggctccacagacgggatgtcacaaagcacctcatgccctgtcaaatcctccaaccgctccatcaggtcatcagaggtcccgaagcgggtatccgtgaaggcggagatctccgacgcgatagggatgactgtctcatacagctgcaccagcttctccagctccgccagcaccttttcatgggtgcagaaggagccgcacatcgcaaatccgacccgttcttttctcacacagggtcacctcgttcttttaaaatgtagtcgactgcgtcccggatagccaccgccgctgcggcaggcaccatccgccccggcagggagcgggcccatacgtggggcagtcccagctcctctgcagcagctaggtcgatgccctggacggaggccagctccacacacaggcagcccttcggcagctgcgccagcagcaggtggcccaggacgggcgaggggaccgtgttgaacacggcgccgaagtcacacagcgcaccatcgaggcgtccggtctccagcgcctgccagccataggcacggatccaagccaggtccgccggttttctggcagtgactgtaacatgggcgcccagcccatgaagccgataggccagcagctttccgatccgcccgaagcccagcaccaaacactccatccccaggagcgtccggtccagatgctccatagcgatctggagggccgactccgccgtggccgccgcgttggcaacggtcagctcttcccgctggaagtagtccaccagcgtcagcccgcagttctcagcctctatctgctgggcgggacgaacctgccctgccagcaacagctggccgggactgaaacggcggaacagcgcactggtgggcagatcctccgtctcactgtttagtatcccgtcctcccggcagagcggcagcggaaggatcaccacgtccgccgccgctgcctgcgcaggcagatccgggcatccggccactccgctggtccagaccgtgcgcccttcctccgccagcagccgtgcaagctctgcctgccgccgatctccgccgatcacgccaaaggtcttgttcatccggcattccccctcaagccatggtatgcacggcgggggcggcggtgattgcctttcctgtttggatgtgatacgatacatgtggtcaaactctcccgaaaggagttctcaccatgaaatttccctatctgctctttgacgcggatgacaccctgttcgactttccaaaagccgcggcccgtgccttttccgccatgtgccggagcaacggcgttccggatacgctggatacccgcgccctctaccaccggatcaaccaggagctgtgggcagcctttgaccggggagaggtctccaaggactatgtgacgttggagcgttttgtgcgcttttttcaggcgttgaagctgccgcgggacccagacaagtgcaaccgggattacctcactgccctgggtgccggggtctatcccctgcctcatgcggaggcggtctgccgggaactggtccgccgggggcacaagctgtacatcgtcaccaacgctgtggcctccgtccagcgcagccgcctgcagggcagtgtgttcgcagatctcatcacggacgcctttatttccgaggacgccggagcctccaagccggacccggcttattatgcctatgtccgctcccgcatacccggcctgacgccggagaacggtctcgtgatcggagactccctctccacagacatccggggcgccaacaatgccggacttccctgctgctggtacaatcctgctggaaaggcccggccggaggacctgcggatcgactatgagatccgggacctgcgggagctgctggatattgtctgagagtacgctttcctgtttgaatctgaaaaatcccggtgagtgccctccaagacgcctcaccgggatcatttcatcttcaaaactgagagccgcgatcagaaacaataagagaccggatccctccggtctcttaccctttctctctgcgcaggaacgcgcatggccgggtgccccccctcacagccacgccgtctccagcagttcatccttcttggcccgggtcatcagctctgctaccacgccccggatctgcttgccctgatagaggacttcgtaggcacagcggctgatgggcatttccacgcctacccgctcactgagctggtgaatgctctccgcggcgaagtatccctccaccacggcgcctacttcctccatggcctcccggggcgttttgccttggccaatgaggatgcccgcccggcgattccgggagtgcatggaggtgcaggtcacgatcagatcccccataccggccaagccgccgaaggtctgccgggagccccccagcttctcccccaagcgggtaatctccgccatagcccgggtcatcagcagggctttggtattgtcctgatagcccaagccgtcgcacacaccgcagctgagggcaatgacgttcttcagcgccgccgccaactccacgcccacgacgtcgccgctggtgtacacccggaagtagtcgttcatgaaggcgtcctgcacaaaacgcgccgcatccacatccaagcaggcggccacgcagccggtgggcaggcggatccccacctcctctgcatgggaagggccagaaagaactgctactttacagatattccccgtctcctcctggatcacttggctgagacgcagatttgtgtcccgctcaatccccttggaaacggacaccaccacagtcttctccgtgagatacggggccattttttttgctgtctcccgcacggcgaaggagggcggtgcgctgaccaccaggtcggcgcccttcaagcagtccaaatccccggtgatgtggagggattccggcagatggacgccctgcaaaagcgggttctcccgggtccgggccatctccgccgccttggcggggctgtgggaccagagataggtctcgtgtccgttgtcgcacaggatctggctgagggccgtgccccagccgccggagcccaatacaactgttttcatctgtattcctccccctcaaattaggaatccggagttagaaatcgagctgttccgcctatggcggaacaattccattttgtccggctctgccggaccgcaccatgccgcattcctaattttttttgcggtgtacgctgaatttattctcgttgccatggataaggcggacgatgttgctccggtgcttccacaaaatcaaggctcccaggagaaacgccaggagcacgatgaccggatccggatagaaataccaagtggcaaaagggaagctggccccagcccagacagatcccagagatacatacttcgtcagcaggaataagagcagaaatcccacccagaccaccaggccgatccgccagtcgatcatccagacgatggtgccgccggagaggatgcccttgccgcccttgaagtggaacatgcaggggaacatgtgacccagcaaacagaacagggcagcccagtatttgaacaagaccacataatagaccgtcatctccgtactcagcggcatatccggcatcatcctgggatcaaacccgccgccgatgtgagccgcgatcagaaccgctattacggctttaaggacatcacataagattaccacaaaagtcagcggtccaccaaaggtacggtaaaaattggttaatcctgcattgccgctgccatgcctgcgaacatcgtctcgcaggatgtatttagaaataatgaccgccccattgaaacagccgcagaagtaggcgatcgcagccaccagccacagttccatccgggaaatgagaaaccataccactgtgcccatcctcacccctccttctcgccccgctggcggatggagagggtgataggcgtgccctccaggccaaaggtgttccgcaggcagttctccagataccgctggtaggagaagtggaacaggcggctgtcgttgcagaacaccacaaagtggggcggccggatgcccacctgggtcatgtagtagatcttcaaccggcggcccttgtcggaggggggctgaacccgtgtctgggcatccgccaggacgctgttcagcataccggtggtgatccgggtgctggcctggttggagacatagtcgatcagctcgaacagccggtccacccgctggccggtcttggctgagatgaacaggatgggggcgtaggtcatgaaggccaggccgttgcggacctcttcccgcatcttgtccatggtcttgccgtccttttcgatcagatcccacttgttgaccacgatgatgctggccttcccggcttcgtgggccaagcccgccaccttggtgtcctgctcggtgacgccttcggtggcgtcgatcaggatcaggcacacgtcgctgcgctcaatggccagggtggcccggagaacggagtacttctcgatgtcctcctccaccttggacttgcggcggatgccggcggtgtcaatgaagacgaacctgccctgatcgttttcaaagtaggagtcgatggcgtctcgggtggtgccggccacgttggagacgatgacccgctcctccccaggatcttgttcaccagggaggacttgcctgcgttgggcttgccgatgaccgccactttaatggcgtcgtcctcctcctcttcttcctcctctggggggaagtactggagacaggcgtccagcaggtcgccggtgccgtggccatggacagccgagacagcgatgggatcccccagtcccaggttgtagaactcataaaagtccgggtccgggacaccggtggagtccattttgttcactgccagcacgatgggcttgccgctgcgcagcagcatgttggccacctcctggtcagaggcggtgaggcccgtgcggacatccgtcagaaagatgatgacagtggcgttctcgatggcgatctgggcctgatcccgcatgaaggacaggatctggtcgtcggtccggggctcgataccgccggtgtcgataagggtgaaggaccggccgttccagtccgtctccccatagatgcggtcccgggtgacgcccggggtgtcctccacaatggagaggcgctttccaatgagtttgttgaacagcatggacttgcccacattgggccggcccacgatggcgacgatgggtttcaccggcgctcacttcccttctttatcaagcagacatacatggtcatattatacccagtgaccggcgaaatggcaagacgtcctccgatttttacacagtatggacgcagaaaaaggagggaagatgttgctcttccctcccgatccacagggcacgtcttatttcgccaccacggacttgacaaccttgacctcgcggccgttgtaagtaccgcactcctggcacattctgtgaggcaggtgcagcgcaccgcatttcgggcatttgacgaggccgggagccgccagcttccagtgggagctgcggcgcttgtcgcgtctagctttggatacttttcccttaggtactgccattgtgacacctccttgatctttcaaaggcaacggagtcgcccccggccttattcattcgttctctctgttctctaaaagctttgccaggaccgccagacggggatccgtctccttcccgcaggagcaggggccgaggttcaggtcggcaccgcaccgggggcacagtcctttgcaatcttccgaacacaatgtcttggtgtccattccaaggatgaacgccgtgcgggccagatcgcccacatccacttccccatcctccagcaggacgatctcgtcgttgtcctcgttctggagctcttccgccaataggcagcgaaagggaacggtcttgtcctgaagaaacgccttgccgcaccggtcgcagaccgcgtccagcgtggtccgggccgtcagctccagctccaggagatccgcggtgttgctcaccgcgccctccacctccacagggcggctgatgggatgccgtccggcaaattccacgtcggacaagtccagagaaaactggaacgtcaggcgcttgccaggggcatgcagtatgggtcttacatcaaaacgcataagctacctcgtaatgacacgaatagtattataagggatgtgtgcccggttgtcaaacaattttttcatgtttttgccgtttccgggcaaattttttcgtttccgggcaggcgctctgttcagctctcctcttcccgacgcttctgccagccggtgatgtcgatgcccaggatcacattgcggaagccctcctgcagccgggcataggtggtgatgttgtagatgtccttgggccggcgggtgttccagccgtcccgcagccgctccgccagctcttggcacaggggctcctccagtcccagcagcatgggggaaagatacgtcaccagcatctgcttttcccgggcctggaccatggtccggttccaggggcgctggcgtttccaccctgcctccagcaggtccagcagctgctccgccagtacccggcggccgtcagggtcctccgccgtctcccggacggcctccatgtacagtggtccgaatcgctccgtgtaggtccggaaggcgctggtgtactcccggcgggtgaaccgctcgttgtaatagcgcgcctcctgcacggcggcgcagagctcttccagcttcattcctcgtcccgtcccttctggtccgcttcgggtccgacctgttctgcaggtgtcgccggacgcttctgctccggcagggcgtcgtcctggctccagctatccgggtcgtccttgtgagccttggcgtactggtacgccttccactcccgccaaagcaccatcgcccctgccgcggcgaacactgcgcccgccgccgcgttcagagccacggtttcggcggtcccgtcccagatgcccttcatcagctggtaggccagatacagcaggtagccccctgccaagacccggaaatagttcacccagccccgctgtttgtttccgtcatgctgcgccatacgtccagtttctcctaaccgattcaaaaaattctctccccgctttacaagcgcccggcaaacaggtatgatggtagcatcaaatacttgcccatcggaggatgccatgcgggaactcaccattggaaaaaacgacgccggacagcggctggaccgctttgtggccaaaagcctgcccctgctgccccccaccctgctgcagaaatacatccgcctcaagcggatcaaagtcaacggcaggggtgccaagcgggacacacggctggagtccggcgatattttacaattatatatcaacgacgagttctttgacaagccctctgaggaaaacatctttctcaccgtgttccgtccccagctggacatcgtgtacgaagacgagaatctgctgctggtgaacaagcggccggggctggtggtccacgccgatgagacggagaaggtcaacaccctcatcaaccacattcaggcctacctgtaccagaaaaaagagtggaatcccaaatgggagaacgcctttgcgcccgccctgtgcaaccggatcgaccggaacaccggcggcattgtcattgccgccaagaacgcggagaccctgcggatcataaatgagaagatcaaaaaccatgaggtggagaagtcttatctctgcatcaccgtaggccgccccaagccagtggaggggaagattgcgggctttcttttaaaagatgaggcgaaaaagcaggtggctttctatcgccgtcccattcccggcggaaagactgccgtgaccctgtaccggactctggagacccggggcccgctgtctttggtagagtgtcggctgctcaccggccggacccaccagatccgggtgtccatggcggagatcggctgtcccctgctgggggacggcaagtacggccggggggatgtgaaccgccgctacggcgagacccggcaggccctgtattcctaccagctggccttccctttccccacggacgccggggcgctgaattacctgcggggcagggtcttcaccgtggcggatgtgcccttccgggacaagtattttcccgcgccggaaactccttaaaaaattcccgtaaaaccccggcgaaatctttgattttgcttgacttttcgccacacatcggatatagtttgttattgctgaatttcgacgagaaaggttccccctcaacagagaaaagaggcgtttcattgtaatcaaaattattatgaaatgggggaggatacatgtccaaagagttgattcgtctgcggaacatccgtatggcgtttgacgacgaagtggttctcaacgatttaaacctctatatcaacgacaaagaattcctcacactgcttggacccagcggctgcggcaagaccacaacgctgcgtattattggcggcttcacgacccctgtgtcgggagacgtcctgttcgacggtgtgaggattaatgacgttccgccctatcggcggcagatcaacacggtgttccagaaatacgccctgtttccccacatgaatgtgtttgagaacgtggccttcggcctgcggatgcagaagcggccggacccgaaggatccctccggcaagcgccgggtaaagatcccggagacggagatccgtcagcgtgtgctggaaatgctggaggttgtcagcctgaagggctttgaaaaccgcaagccggacgccctgtccggcggccagcagcagcgggtggccatcgcccgggccctggtaaaccggcccaaggtgctgctgctggacgagcccctgggcgctctggatctaaagctccgcaaggacatgcagctggagctgaagaaaatccagcagcaggtgggcatcaccttcatctacgtcacccacgaccaggaggaggccctgaccatgtccgacaccatcgtagtgatggacaagggctgcatccagcagatcggcacgccggaggatatctataacgagcccaagaacgcctttgtggcggacttcatcggtgagtccaacatcattgacggcgtcatggtccgggacaagctggtgaagatgtacggccgggagtttccctgcctggatggcggctttgctgagaacgagccggtggacgtggtcatccggcccgaggacatcgacatcgtccccatggagcagggacaactggtggggactgtcacctctgtcaccttcaaggggatgcagtacgacatcatcgtggatttccggggcttcaaatggcttatccaaaccacagaccattcccccgtgggcgcccggatcggcatcaagatcgatcccgacggcatccacattatgaaaaagagtccgtattccgggatgttcggcgattactcctccttctcggaagaatatgaggagatgagcgacgccaactgggaggcggatgaggaggagagcgaggatgaaaaataagctctcattgttcgccgttccctatgtgggatggatgtccatcttcgtggtggcgcccatcatcattatggtggtctatgccttcagcaccgccgccggggacttcacgctggagaacttcgcccgcatgggtacctatacagcagtgttcacccgctcgtttaagctggccatcatcgccacactgatcgctctgctgatcggatacccggtatcctatatgctctccaaggaggggccgcaggtgcagcgcatcgctatggtgctcatcatgctgcccatgtggatgaattttctgctgcggacctattcctggatgtccattctggagaacaacggacttttgaaccagctgtttcagcagatcggcctgatcgacctttacaaccagatcgctatgcactttgcatctgatcccgccgcgtatgtccccatcgatcacttccagatgatcggtacccagggcgccgtagtgctgggtatggtgtacaactacctgcccttcatgatcctgcccatctactccgtgctggtaaagctggaccattccctcattgaagcggcccgggacctaggcgccagcagcgtgcaggtgttccgcaaggtcatcctgcccctgtctttgccgggggtgctctccggcatcaccatggtgttcgtgccctccgtgtccaccttcgccatctcccgtctgctgggcggcggcacccagatgatgctgggcgacctgatcgaacagcagttcctgggcggggcctataatccccagctcggggcggctatcgcgcttgtgatgatggccattgtggtggtgtgtatgctggtgatgaaccgtttcggcgacggtgaggaacaggcggtgatgctgtgaaacggaagcatctgctgggaaaccgcatcttcatggcgttggtattcgtattcctgtatgcgccgattttcattctcatcatcttctccttcaatgccggcaacagcagcgcggtgtggaagggcttctccctgcactggtatgcggagctgttccagaaccgcctcattatgcagagtgtctataccacgctgctggtatccgtgctttccacgctgattgccactgtggcgggcacctttgcagccattggcctggccagtatgcggcggcggtggcgcacgcccctgatgacggtgaacaacattcccgtcatgaatgcggagatcgtcaccggcgtctccatgtgtctgttgttcgtggcctttttcggcctgtggaaggcctttgccgtctggttcaaccaggcgcaggataccttctggatggaggagaacatctatcttggcttcggtacactgctgctggcccatgtgaccttcaacatcccccacgttatcctgacagtgatgcccaagctgtgccagatggacaaaaacctagtggacgcggcccaagacctgggctgcacctggatgcaggccttctggaaggtcattatcccggagatcaagcccggcatcatctccggcgcactgatcgccttcaccatgagcatcgacgatttcatcatcagttacttcaccgccggttccggcgtgtccactttggccatgaccatctattccatgacgaaaaagcgggtcagcccggagatcaatgccatttccacgctgctcttcggcgctgtgctgctgctgctcatcatcatcaatgtccgggaatcccggcaggagcgcctgcgggagcgagcccgcgcatgactatcggtcccacggcctgcgggtcttgagatacgcattcaaatcaacactggaggaatgatcaattgaaaaaaatggtagccttgactctcgccttactgatggcggcgagcctgttcctgtccggatgctccgtgcgcaaggacacctctgactcggaaaattccggcagcagtaacggcagcggcagcggggaccgtgtggtcaacgtgtgcagctggggtgaatatatcgacgagtccctgatcgaccaatttgaagaagagaccggcatcaaagtcaactaccagaccgcagagagcaacgaggtcctctattcccagctgagcatgggcggcgtggactatgacgtcatcgtcccctccgactacatgatctcccagctgatcgaagaggatatgctggccgagctcaattatgataacatccccaattttgagaagatcgacgaccgcttcaagaatctgtcctacgatccggagaacaagtacaccgtgccctacacctggggcactctgggcatcatctccaacaccgccaaggtgcaggagcccattaccagctggagcgccatgttcgatccccagtacgccgggaacgtgctgcttatcaacaactcccgggatgctctgggcatcgccctgttgtacctggggtactctgtgaataccactgacgaagcggagattcaggaggcttaccagctcatcgccgacgccgtaaagaacggggtgtatcagggaaaggtcatggacgaggtgtttcagaagatggagggcggcaacgccgccattgccacctactatgccggtgactatctgagcatgctggaaaacaacgaagatctcgcctatgtagtgcccgaggagggcagcaactggttcgtggacgccatgtgcgttctcaaaacctcccagcacaaggaggaggcggaggcctggatcaactttatggcctccactgaggcaaacctgcggaatatggactatatctggtacgcctctcccaacgctgaggcgctggagacctatcctgcctactatgaggagacctacggagagcccctggatcccgctctctatgagatcatggccccctcccaggaggtgctggaccggtgtgaggcctacttggtcctccctgctgagacgcgcaccctctataacgacctctggacgcaactcggtatctgagctgtaaaatgcggcaccggaacactacccggtgccgcttctttttcccttgcgcattccactgctttcctgtacactggaaaggcggaagatattttaccaaggaggaatcctctcatgattttgattggaacaaaatgccgcctggagcaaactgttacggacgcccttaccgccgctaacgtgggttccggtgccctgccggtgttcggcacgccctatatgtccgccctgatggaaaatgccgccatgacctgtctgcagagctttctggaggagggccagggcagtgtgggcacccatctggacatctcccacgacgctcccactcccatcggcatgaaggtgtgggcggaggcagagatcaccgccgtttcggaaaacggcaaaatggtggacttcgctgtgaaagcctgggatgagagcggccccatcggcagcggcacccacacccgggccatcgtcaagaacgaaaaatttctggcaaaatgcaatgccaagctggagaagaagtaattctttccacatggacaaaacaagggaggacccggaatgggtcctcccttttcttctgctatcgcggtgccgtggggaaatcgctcccacggggatcaaaacagcgtcagctggctggtctccgccatcccggcgaaggctcccagcgccttcagctgctcaatatgggtcttggacagcttgttgcagcacatggcgaactcctcaacggagacgaactccttcccattccgcttctccactgtgtcgatggccgccgcctctcccaggccgtggaccgttgtgaagggcggcagcagaccgttctccgtcactttgaacttggtggcatcggactcataaatgttgatcgtgtcgaagtggaagccccgcaggtagaactcatagcacacctccagggtggtcagcaggttctgctccaccgccgtggcgtccttgttgttctcgatctcccggatcttccgcttcaccgcatcctttccggcacagcagtactccgcatcaaaggccttggcccggacggagaaaaaggttgcatagaatgccaggggctcatggaccttgaaccaggcgatgcggaaggccatcatcacgtaggccaccgcgtgggccttggggaacaggtagccgatcttggccagggagtcgatgtaccactccggcacgtcgtggtcccgcatggcctccacccagccctcgtcaaagccgcccttcttcaccttgcccttgcggaccttctccatgatcttgaagctcatcttggggtccaggcccttggagatcaggtacagcatgatatcgtcccggcagcccaccgtctccagaacggaggcggtgccgctgacgatcagctcccgggcgttgcccagccacacgtctgtcccgtgggagaagccggagagccgtaccaacgtgttgaagtccttgggctgggtatccaccagcatctgccgggtgaatcgggtgttgaactccgggatcgccacggcgccggtggggcccagaatctcgtcgttctcgtatcccagcactttgctggaggtgaagatggacatggtgtccgggtcatccaggggaatctggcgggcgttgacaccggtcagatcctccatcatgcggaccatggtggggtcatcgtgtcccagcatgtccagcttcaggaggtttgcctccatagagtggtattcaaaatgagtggtgatggtgtcggagtcgtcggcgtccgccgggtgctggaccgggcagaagtcctccatgtccatatcgtcgggaacgaccaccaggccgccggggtgctgaccggtggtccggcgggtgcccacgcagcccagggtcaggcgattctcctctgcccggcccacagtcatgccgttctcctccaggtattttttcacgaagccgtaagcggtcttctccgccagtgtaccgatggtaccggcccggaacacctgggtctctccgaacatctcgatggcgtggcggtgggcccgggcctgatactcaccggagaagttcaggtcgatatccggcaccttgccgccgccgaagcccaggaaggtttcaaaggggatgtcgaagccgtctttgatgtattctgtgccgcacaccgggcagatcttgtccggcatgtccgcgccgcagccgtaggagccgtcctgaatgaactccgcatgcttgcaattcgggcagcggtagtggggcggaaggctgttcacctctgtgatcccggacatataggccaccagggacgagcctacggagcctcgggagcccaccaggtagccgttttccagggaccgctgcaccagcttctgggcggacatgtacaccacgtcgtacttgcccagaatgccgcccagctccacgttcagccggtccacaatcagcttgggcgggtcctcgccgtacagctcatggaccttgttccacaccagggaattcagctcctcctcggagttctccagccggggcgggaacagctcctccggcagcaaggggaaagtctccacctggtcggcgatggcctgggtattggtcaccaccacctcataggccttctccttccccaggtaagcgaactcctccagcatctcatcggtggtcttgaagtagatgggcagcggggcgttggcgtccgggaacttcttggaggccagcaggatgtggcggtacacctcgtcctccggctcccggaagtggacgtcgccggtggcgcagacaggcttgcccaactcctctcccagccggacgatggtgcggttgaactcccgcagctcctcctccgactggacgtcgccgtttcgcaacatgaaggcgttgttgcacaggggctggatctccagatagtcgtagaaagaggcgatgcgtttcagctcttcccagtccttgtggtccgccacggcccggaacagctcgcccgcctcacaggcggaacccacaatgatgccctcccggtgctccagcagcagactcttggggatggtgggcacccgcttgaaatacttcagattggaggcggagatcatctggtacaggtttttcagccccaccttgttccgggcgatcagaatgatgtgcttggggaagcggttggtcttgctgcccaggggccgcagcttctccatctcgcggtttaccgcctggagggtgtggatgccccgctcgtggagcatcttccagaaggggatcagcatatagcccacggtggcggcgtcgtcgctggcccggtggtggttgaagttgggcagctccagccggtccgccacgatgtccagcttgtactttcccagatccggcagcaggttctgtgccagaatcagggagtccacataggtgggctggaagtccagccccaccttccggcagcccgcccggatgaagccgatgtcaaactctgcgttgtgggccgccagggggcggccgtccacgaacttcaaaaattccgccagggcctccttcagttgaggggcgtccttcagcatgtcatcggtgatgccggtgaggccgatgatctccggcgtcagccgccggttggggttgacgaaggtctggaaccgatccgtaatctcaccgtttttcagcaccacggcgccgatctccgtaatggcctcccggtccaccttgaggcccgtggtctcgatgtcgaagcacacgaactccccgtccagggagcagtcctgagggccgtggaccaccacccggtcatcgatgttgttgacaaagtagccctccacgccatagaggatcttgatcttgtccccagcggcgtgccaagcgtccgggaaggactgggccacgccgtggtccgtgatggcgatggcgggatgtccccaccggatagcctgttggaccacctctttcgtgtccgtcagggcatccatattgctcatcttcgtgtggaggtgcagctccacacgcttctccggggcggtatcctgccgctcagtgtgctccgccagctggatgtggtaggggttcagctggatgtccttcccgtcccaggtgggctccatcttgccctggacgcacagccacatgccgggcttgatggcgctctccagtccctgagcctccttctccgtcaggttcttctgaacggtgacggagttggtatagtccgtcatgtcgaagctcagccgccacataccgggccgccgggtctcccggcactcgaaggcgaacaccttccccgccacggtggcattccccatcttcaggtccaggatcttcatgggcaccggctggatgcgaatgggcttgcccatcaggaccttgcctgcggcctgcttctcgcccttactgccggagggggccgccgggaccgaagcagccgggcggctccctgcggctgcggcctgggaagaaggagccttgcaggtgacttccgtcgtcacctgtcggaagccgtatacgcccatcagcagatgcttcagctcctccagctccgcatctcccagctccgccctggtggtgaggcgcagcgccagcgacatgccggcctggtcgatgcaagcgccgttcaccactgcgccggccaaacgaagccgcagctctccggagagctgcagctcagtaaacatttcaaaaaagggtatatctcttgacatagacgccaccttgttaaacaggaatcaaatgctgagaaatcagaaattaggaatgaggaattccggcgtccggcaacgccggacgtatgagcattgtcccaccagaggcggaacacaacaattccgaattcctaacttctcattcctcatgggagtttttcaatttcctccatcagcttgtccaccagctgctcctgcggtactttgtaaaggatttctcctttgcggaaaatcagtccctcacccttgccgccagcgatgccgatatctgccgccgctgcctcgccggggccgttgacggcacagcccatcaccgctacggtgatgttcttcgtgcagttcatgaggccccgctccacctcttccgccatggggatcaggtcgatgcgggtgcgaccacaggtggggcaggcgatcagattcacgccctccttacggagtccggcggccttcagaatcttcttggcagcgaaaatctcctcgatcgggtcggcggtcagcgtcacccggatggtatctccgatccccaggcacagcaggcccccaattcccatggcggatttcacaagccccatggaaggggtgcccgcctctgtcacgcccagatgcaaagggtagtctgtccgctcgctgagcagccggtaggccgccatggtcaggggcacatcggaacacttgacggagatgcagatgtcatcaaaatcgaacttgttcaaaagggccacgtggcccatggcgctctccaccaatgcctctgccgtgacgccgccgtatttggcccgcaggtccttttccagagatccgccgttgaccccaatgcggatggggatggatttttggcggcagatgtccgccaccgccttcaccttctcctccccgccaatgttgccgggattgatgcggatggcgtcgatgccccgctctgcgcacgccaaggcatacttgtagttgaagtggatatccgcgatcagggggatagaaatctgttccttgatccggtccaccgcctctgccgcggcctgatccggaatggcaatgcggatgatctcgcatccggcggcctccagcgcgtggatctgctccacagtggcgcggacatcgtcggtcttggtattgcacatggattgaatagacactggggcaccgccgcccacggccacatcccccaccatcaaacgctttgtcatggcgcttcctccctcaccagggcgtaaatgcaggaatccagcatctccccgtttttgtacacgctccgccgcagagtgccctccagggcgaaccccgccttctccaacacccggcgggaggccgcattcctggcaaatgcctcagcgtggatgcggacgatgtcccaggctgcaaagccctcccggcacatggtttccacagcggcggtcatgatcccgcggccccagaagggctctcccagccagtagcccagctctgcgctcctccggtatacatcgctgcccaggaacaggccgatgctgcccgcagcttcgccgtccacctcaatggcccggcacatctgaccccggccctcctgccggatgcagctctccacaaacgtggccgcatcctgtggggcataggggcagggaaacacgtcccgcaggttggcggcgatctttgcattgtccgcgtaccgggcgatggaggcagcatctgcctcccgccagggccgcagggtaaagtccgtcatgactcgctcctatccgaacagtttgaacacatcattgaatgtcaccaccagcatgaagcccatcagggccacaaagcccacggtgttcaccgccatctcatacttctccgggatcttctttcggaacagcttcatggcgatctcatcaatgatgaggaagaagatcttgccgccgtccagagccgggatgggcagcatgttcatcactgccaggttcaccgccagcatggcgccgaagtagaggatgttctccaccgcggcggcaatggtctctgacgcggtgcccacctgggtgatagtggagacgatgcccaccgggccgctgagatcgtccatgcccgcctgaccggtcaccagcatctgcaggctcagccgcacgatccgcacaaagtcgatggtgttcagccagctggtcttcaggatcgtccagagattggcctcctcaatctggtctcttgcgatatagacgccgtagccctgataggtctccccctctgtgccggtgtaggtgccccatgtgacgtcgttcagctccaccttctcgccgtcccgcaggaccaccaaatccatgggctggccctggtgcaggctcatcagcagggacacgtcactgtacaggtacacccgctccccattgacggaataaaaaatatctccggcctggatagtctggccgttccgctcctcaaactccggcgcggtcccggcggccgccgggatcagaaatccctgggcaccgctatacaccgccagaatgatgaggaaccccgccaggaaattcataaaggagccggcggcaaaaatcaccacctttttccagaagccctgacggcccagagaccgctcgtcgccagagtcctcatcctccccctccatagcgcagaagccgccgatgggcagcaaccggagggaatactgggtctcctccgtctccttgtgccagatcagaggccccatgccgatggaaaactcgttgacccgcacgccgcagagcttggcggccaggaagtggcccagctcgtggacggcgatcagtacgccgaaaatcagaatggccgccaggatatacacaatggtcatgcaaaaactcccgtcaaaaaacttgcttcaagcccggtccagcaccgcctgccgcgccgcctggtccgccgccagaatgtcctccagcgccggttcctgctccgccggcacagctgcccgggcctccgccaccaggcggggaatgtcgtggaagccgatcctgcccgccaggaacaggcccaccgcctcctcattggcgccgttcaaaacagcgcaggcggtgccgccctgagccgccgccgcctctgccagctgcagacatggaaatgcatcccggtccggctgggcgaaggtcaggggcgggcaggacagcaggtccagcggctccgccggactttccacccgttcggggtatgtcatggcatatcgaatgggcaggcgcatatccggtgtgcccagctgggccaggaccgccccgtcccggtactccaccagggagtggacgatgctctgccggtggatcaccaccgacacctggtccagcggcagacggtagaggcgcatggcctcgatgacctccagccccttgttcatcagcgtggcgcagtctacggtgatcttgggtcccatggtccagttggggtggcggagggcatccgctttggtcattttgcccacttcttcataggtcatgccgtaaaaaggcccgccggaacaggtcaggatcagccgccggatctcccggcggtcggcgcagccctgaaggcactggaagatggccgagtgctccgagtccacaggcacgatctcggcgccgtgcgtatccgccgcatccatcaccagctgtccggcgcagaccaacgtctccttgttggccagggcgatgcgctttctctcccggatggcggccagggtgggacgcagtcccaccatacccaccacggcggtgacgaccgtatccgcctccgggcagacagcggcctccagcagggcctccgggcctcccaaaaccttggtgtccatgtcggccaggcgtaccgccaggtcacgggccgccgcctcatcggtgaggaccgccagccggggccggaattttcggacctgcgcctccagccgctccacatccatgtgggcggtaagggcggccacacgcagtcccagctgctccgccacgtccaatgtctggcggccgatagaaccggtggcacctaaaattgaaatcgtcttgctcatagcattatcctattctaaacagctgaaaacaatcctaaatcttcccaaatcacccgttcagagcagctgtaaggccagccacacgaagggcgccacgaaggtaacagagtcaaaccggtccaggatgccgccatggcccggcagcaggttgccataatccttgacgccgaactcccgcttgatgacggagaaactcaggtcgccgatctggctgatggtgctgccgataatacccagtgcaaagactgccccccaggagatctgcggaccagctgccatctcgattggcggataaacagtcagggtgtgtgccatgctgtccgcgactagcttaaaaaccgtcatgccgatgacaccacccagcagaccgcctatggctccttccacagtctttttggggctgaccttgggggccagcttgtgcttgccgcacagcattccggcaaagagcgcgaaggtgtcgctgccaaaggagatggccaagggcagaaacacctgcagcatcccgatggcgggcatcatccgaagccgcagcagacaggagaacatcaaggggaacgccagcccggcgaagatagcgcaggtgacagcggcaaaggggatgccctgctcctcgtcataccggtggatagccagggcaaagatcgcaaagatgaacaccgcgcccaacagggcggcgaagggcagcaccggcagggcagtcagctccgtgttctcaatggacatttccccgtacacgcacaccggcaccgccgccgcggcgatcactgtcagggggtcaggggcttgcccctctctcccgccgccgcgcgcatcagctcccaggcgccgatggcgcacatggccgccagcaatagcatggtggcccaggacggggcccagcccaggatcagtatcaggagcggcaggcccactacggccaccatcacacgcttgaacataggatcagcccttttctcaatttctgtaaaggtttatttctttacgccgccgaaccggcggtctctctgttggtaggctgcaatggcccggtctagctccgcttcgtcgaagtccggccacagggtatccgtgtaatagaactccgaataggcgcactgccacagcaggaagttgctcaaccgctgctctccgctgggccggatgataagctccgggtccgggattcccgcagagtccagatagctggagaacagggcatcatccaactcctccggccgcctctttccggcggcgcagtcggtggcaaaacgccgggctgctcgcagaatctcgtctcgcccgccgtaattcaggcacacattggcctggaaatcgtccttggacaggtgctccgtgatctcgtccgtctcccgggccagggcccgcagatccggggcgataggggtcatgtcccgaagaagtggagccggatgtggtccttctccatggtgtccactgcctccagcagataccgcttcagcagggccatgatggcagagacctccacctctgaccgcttccagttttccgtggaaaaggcgtacaccgtcaggtactttacgccgatgttcttgcagtaggtagcgatgcggcggaacgtctccgctcctgccttgtggccagcggtgcggggcaggccccgcttcgtggcccagcggccgttgccgtccatgatgatcgcaatgtggcggggcgggaccaagggctggtccaccgcaccgttgatactctctggcatgataaattctctcatttcaaaatggattgttggggggatctgtcccattggacgggaaatgcagccatgatgatggctggcccattctctcccccattgtcgtcatcgcaaagtccgctaaacgcagtttccgcctgcggcaaaactgcgcccctcctctccccactgtgcaaaatacagcggagccggtgtgagacggtgcctgtgtatttacgggagaccgatgaaaatcgggggtgcaaaaccgcatttgaccagctgctctttccgcccgttccgctttacccgcaagcggtacgccgcgtctgtaaggcggcagaaccgccaaaaactgcgcagctgctgcgcactggccgagcgttgtggcaagaaacacaggtatttactggatagccagaaccgcacaccgggatgattaatatcttggtacagccgccaagcgggaaagcatcactgccacgcagagggcgctgacagcccagcagaggccgaaaaggcctatattcacagagttggaaatggaggcaatacccagagagagccccagccagttggcaaacagactgcgaatcaagaagaaaaatcccagcagcatggcaaccacgtgcccggcaaacagcccccggagatccttccgatgccgcagactccgccagcccaggaaaaactctatcgcgctgaccgcgatcacacctccgatgaacaggggaatcacttctgcttcaaacgacatttgtacctcctcctttttgtatcgggagaaatgtgtcggctgcttagttccccttttcccaccagcggtcgaacttccaaggaaagtggaagccgcaggcgcggcagtattgggtctcctccatggaaaaccagggcaggatgaagcgcccacagttgggacagcggagatggcgcagttcaatccccctaaaggcgattgccgcagcaactcccatggccaggaataccaaccccagtccgccccggatcccgcccgccagacacaaaagcaaaaccgctgcaaacagtgttcccctggctgccgaataccatttctgttccagtttcatagtcccctctccttcagtcaataacccccagattccacttccgcagctgccggtccaacagcagtgaacagaggaggacgccaatacgacgaccaccccgatgagatctgcaccatccgccacaggacggcagtcggggaatcgcagaaagccatggtgtgcccaaaggccagcccaaatcggcgcttgcactgatacaccggcgcctgtcagcgcggagagccgctgcaccggaacggttctgaagcgttttttctcttttaccggccccccgtggaagcggctccggcgggagcagaatccccccggccgccgggcggcggccccgagtgaccgcaggtcacctcacagaccctgaaagggtgacagcaccttacaaaatgtgcaatgcccccggcgggcagccgtgctcccgccggaggccccggcggcttttacaccgccatcagttccttttcctttttggccagcagcgcatccagctccttgcagctgtcgtccgtcagcttctggagatccttctccgcctgcttcagatcgtcctccgtgatctcggaggctttctccttcttcttgaacgcctccatggcgtcccggcggatgttgcggatggccaccttgccgttctccgcgtacttgtgaatctgcttcaccagttccttgcggcgctcctccgtcagctgggggaagctcagccggatgctggcgccgtcgttctgggggttgatacccagatcggagttctggatggccttttcaatgctcttcaccgccgtcttgtcccagggggaaatcagcagtgtccgggcgtcgggggaagagatggccgcaatctgctggatgggggtggggctgccgtagtagtccaccatgatccggtccagcacggaggcattggcccggcccgcccgcacggaggcaaagtccgcggccacggagtcgatgctcttcttcatcttgccctcataaatcttgtaatcttccttcagcataaataggtccttcctttcacagttgagtgtatggggaggcgctgtcgcgcatgcgtgctctcattccttgacgatggtgcccacgttctcaccgcacagggcccggatgatgttccgcgggtccttcagggcaaacagcagcaccggaatgtggttgtccatggacagggacgtggcggtggagtccatcaccgccaggtgctgggccagcacatcgtcataagtgatgacgtcgtacttcaccgcagtggggtcctttaccgggtcggccgtgtagacgccgtccacgttcttggccagcaaaatcacgtcggcgtcgatctccgccgcccgcagcaccgccgcagtgtccgtggagaagtagggattgccggtgcctgcgccgaagatcaccacccggcccttctccaggtgccgaatggcccgggaacggatgtagggctccgccacagcccgcatctcaatggcggtctgcacccggacgggaatccccttctgctcacacacgtccgccacagccaggcagttcatcaccgtggccagcattcccatgtggtcggcccgggtgcgctccatggcgccgccgctgtttttcgcaccgcgccagaagttgccgccgcccaccaccagacctacctggacgcccatgtccagacactccttgatgacatcgcagacctgaccaatcacctcaaaatccaggccggtatgcttgtcaccggccagggcctcgccgctgatcttcagcaggacccgtttatacacaggcttcgccatgatgaaaacctccgtctgttctgctcacaaaatatcattgatattttagcgtatttttccgcttttgcatagggggtagacaaagtttttccaaaaaagcaggtcctgcggacaggaagaagagaggaccgtggtcctctctttccgcattatcccccgcaggtctggaccagcaggcggatcaggtcctctttccccattcccttctccgcggaaaaggggagcagaatatccgcctccgtcagctccagcgtctcccggaccagttgaagggccggctccacctggctctttttcagcttatccagcttgttggccaccacgatctccggacagcccgtctggcggaaccagtcgtgcatcacaagatcgttggccgtgggcttgtggcggatgtccacgatcagcacgccggtggtgatccggtccgcctcctcctggaagtagctctccatcagcttcgcccaccgctccttctccgcctgggagaccctggcatagccgtaccccggcagatccaccagataggcccggcggtcaatgaggaagtagttcacctgagtggtcttgccgggggaggcgcccacataggcaaggttcttccgtcccaccagccggttgatgacagaactctttcccacattggaccggcctgcaaatgcgaactggggcagaccgtcccgaatgaaatcctcccgccgtccggcagagcggacaaactccgccttggcaaaattcaaagccatacaaacactcctttactgccgcacggcggcgtcacggccgctctcacgccccgccggggcaaaggccgccacatggtccgccacctcttcccggatgggatcccgctctgggcacagagcggcggcgaacacctggtccaccgtttccaccggcacgaaccgcagggcagcccggacggtctggtcgatctcctccagatcccggacgttgtccttgggaatcagcaccgtggtgatgccgctgcggagggcggccatggtcttctccttcaatccgccgatgggcagcacccggccccgcagcgtgacttcgccggtcatggcaatgcccgccttgatcttccggtccgtcagggccgagagcatggcagtggtgacggcgatgccggcggaggggccgtccttgggcactgcgccctctgggaagtggacgtggatgtccttcgtcttgtaaaagtccgctggaatccccagcaccgccgcccggctccgcaggcagctgagagccgcttgagcagactccttcatcacgtctcccaggttgccggtgagctccagcttgccggagccgtccatgacgttgacctccacctccaggatctcgccgcccgcctcagtccaggccaggccgttcaccacgccgatctcctcccggtccgtgtggagatcaggggatagggctggcagtccaggaacttggggagctcctcctctgtcacggtaatccgcttgacagtgccctccagcaggcgcatatccgccttccggcagatggcagccagccgccgctccagcaggcgcacaccggattcccgggtgtagtcccggatgacggcccggtacacgtcgtcgctgatgcggacagcgctcttcttcagtccgtgctctgccagctgcttggggaacaagtggcgcttggcgatctgcagcttctcctcatccgtgtagctggagagctggatcacctccatccggtccagcaggggccggggaatggtgtctgtggtgttggcggtggtgatgaacatgatcttggacaggtccaccgggatctccaggaaatggtcccggaaggtgctgttctgctcgctgtccaacacctccaacagtgcggaggccgggtcgccccggtagtcgttgcccaacttgtcgatctcgtccagcagcagaaggggattcatagacccgctgcggctgatggcctcgatgatccggccgggcatggagcctatgtaggtcttccgatgtccccggatgtccgcctcgtcccgaacgccgcccaggctcaggcgggccagcttccggttcagcgccttggccacgctgatggcaatggaggtcttgcccacgccgggcgggcccaccaggcagaggatctgccccttgacgtccggattcatctgccggacggcgatggtctccagaatccgctccttcaccttttccaggccgaagtggtccttttccagcaccctgcgggcggcgtccacactgacccgctcctttgtggtggtgttccacggcatctccagacacacgtccagatagttgcggatcaccgcaccctcggcggagccgaagggctgcttggccagcttgttcacttccttcagcaggtgctgctccgtctcctccggcagctccagggccaggatctcctggcggtaggattcaatctcgtcctcgtcgccgtcatcggtctcccccagctcgttctggaggacccggatctgggtgcggaggatctggtcccgctgggtgcggaccagctggtcccggaccttgctctccatttcgtgctcaaagcccagcacgttgttctcccgcaccaggaaaccgttgagcttccgcagccgggcgaagggggagaattcctccaggatctcctgcttgtcggtgtagcgcagggcgatgttctgggcaatatagtccgccaggaagccggggtcccggctgtccatcaccgtggccaccacctcctccggcacaccgctggcctgctcggcatactcgccgaacagggcgtaggtctggcggagcagggcctccgtccgggggctcttccgcatggcctcagaggacggctcctccgggatggcctccacattggcctggaggaagggctccgtctgccacaggcggcgcaggtgggcccgctgccgcccctccaccatcactcggacagaggactggcccagccgcaggatctgcgtgatgtgggagaccgtgccaatggtgtacaggtccttttcctccggcgcgttcaccccgatctcccgctgggtcaccaggaagatgtcctgatcggcctccatggcccgctccagggccgcgatggagatcggccgctccacgtcaaaggtcagtgtcatgtgtggaaacaccgtcaggccccggagggccagaacgggcagattccaagtggtcagttccatgtgcttgttcctttctgaggggatggtaaaacaggagagaggggcgcggcagcgtccctccctctcttcattaagacgccgacgcgggggtcgaggagccggaagccggcctgccctctcccttgccggtgttcaatttcacagaatagttgatcttcttggggtcgtgggtcagctcgggaccgctcctgccctccacacagtcctttgtgatgactgctttcaccacagcggggtcggaagggatgtcgtacatcatgggagtcaggataccctccatgacggcccgcaggccccgggcgccgatgttccgctcgatggccttgtcggcgatggcctccagggcctccggctggaactccagctccacctcgtcgtactccatcagcttcttgtactgcttcaccagggcgttcttgggctccgtcaggatgcggaccagatcctcccgcttcaacgcattcaaagacgcgatcaccggcaggcggcccaccaactccgggatgatgccgaatttcagcaggtcgtggggctggacctcgtgcaggatcttgctgatgtccttgtccttctttccctggacgttggcgccgaagccgatggacttctggtccagccgccgctcgataatcttctccagcccgtcgaaggcaccgccgcagatgaagagaatattcttcgtgttcacctggatgaactcctggtggggatgcttccggcctccctggggcggcacgttggcaacggtcccctccacgatcttcagcagagcctgttggacaccctcgccggatacgtcccgggtgatggaggtgttctcgctcttccgggcgatcttgtcgatctcatccacatagatgatgccgtgctccgcccgctccacgtcgaagtccgcggcctggagcagccgcagcaggatattctccacatcgtcgcccacatagccggcctccgtcaaggtggtggcgtccgcaatggcgaagggcaccttcagaatccgggccagcgtctgggcgaacagcgtcttgccggaaccggtgggccccagcagcaggatgttgctcttctgcagctccacatcctcgtccccgccgaagtagatccgtttgtagtggttgtacaccgccacggacagggccaccttggcctcgtcctggccgatgacgtactggtccagcacgtccttgatctcgcggggcgtgggcagctgatcaggcaggtcctccagcgcgctggaagaggtgtcctcaaacccatcgttcaaaatgctcatgcacagctggacgcactcatcacagatgcgcacaccgggtccctggatcatccggtggacctggctctcatgcttgccgcagaaggagcaccgcaggcccttcttgctctcgtcactcatggtattacctcagttttggaatttggtgcttatttcttgctggtgatgatcttgtcgatgaggccgaagtccaaagcctcctgggctgtcatccagtggtcccgctccgaggccgccttgatctcccctgccgtcttgccggtgttgttcgccaggatctcattcaagttcttcttgatccgcaggaagtgctccacgtcgatctccatgtctgtcaccttgcccttggtaccggcggagggctgatggatcatgatctccgcgttgggcagagcaatgcgcttgcccttggcgccggaggacagcagaaacgcgcccatgctggcggccatgccgatgcagatggtggatacgtcgcacttcacgtactgcatggtgtcgtagatggccatgccgtcagtgacggagccgccggggctgttgatatacagctggatgtccttgtcggggtcttgggcctccagatacagcagctgggcaaccacaaggctggcggtggtggcgttgacctcttcccccagaaagacgatccggtcgttcagcagacgggagaagatatcataggaccgttcgccgcgattggtctgctcgactacataagggactaagctcattggtaaaacctccttgatttccgcaccggggaccggcacagatgacagatctgttcctcccaaacccgatgcgtcttccccgccccggtggggcaggtaaggcaaaagcgcccggcccgcctgcgggccgccgcgcctctgccaacgcacacgcctatcttaatatagacgccatgcgggaatctgtcaaatcgatgtagagcgccttccgccggcggaaaaacacaccgctccgccggggccgtcaattcctagtatacccggaattatttggattcagcaggcgtctcctcttctttttttgccgcagccttcttggtggccttcttggcaggcttcttctcctcgccgtcctcgtccgccttcttgcgggtggtcttcttggcaggcttttcctcagcggcctcctcaccctcggcgtcctctgccttcttggcagtcttcttggcgggcttcttctccgccttcacggcggtggcgctgtccaccaccacggcgatggccttctggctcttcagctggtcctttacctgctcagcctggagatacttcttcacggtctccagatccatgccgtactggtcggccatccgctggaactcggcctccacctcttcatcggtggcgtcgatgttctcctccttgatgatggcggccatggccagatccatgcggacctgcttgagagcgggctccttggcgtcggccagcagctgggcctcatccatgccggtggccttcatgtactggtcgtactggagaccctgctgggccagctgcatcttgaagttgtccaggaactggcgggactgggcctccaccatggcgtcgggcacatcggcggtgatgttctcagccacctgctccatcagggcgtcctcgaaggcgcgcttcacggtctcctcccgctcggcggtgatcttcttcttcagatcagccttcaggtccttcagagtgtcgaactcgctgacgtccttggcgaactcatcgtccagggcggggatctccttctccttcacctcatggaccttcaccttgaacaccactgccttgccggccaggtccttgtgatagtcctccgggaatgtgatgtccaggtccttctcatcgccggccttcacgccgacaagctgctcctcaaagccgggcacaaaggtgtgggaacccagctccaggctgaaattctcgcccttgccgccctcaaaaggcttgccctccaggaagccctcgaagtcgatgacgaccgtgtcgccctccttggcctcccggtccacgctcaccagacgggtgttgcggtcggtcagagccttcaggcgctcgtccacatccgcaacggagaccttgacctcctccttgggggcggacagtcccttgtactggcccagggtcacttcgggatacacaggggcggtggccttgaaggtgaagccgtcgcgggtcacctggccctcgatctccacagagggatagcccaccacctggagctcctgctccttcacggcagcctcataggcctcggggaacgcgatattgattgcctcttcgaaaaacacctctgcgccgtacatcccctcgatgatcttccgggggccttgccagggcggaagcccggcacgttgatcttcttgcgcatcttctgatatgccttttcgatggcagcttcaaactccggtgcaccgacctcgatggtcagaacgacctggctcttttcgatcttttcgcagcttttcacactcatcttgtttattcctccgttcatcgccggtcataagccggtgcgaaatggtattttaccatacaaaacctgaaaatgctatacttttttccgttattcacaaattttttttggaacaaatcccagatagtcggcggagatcagggagaagtccgtcccattccacccgccctccagccgccgtttgatggcgtagccgtggaggtggccgtagcagcaccgctccacggggtaggccgagagcagccgcaggatctccgggcactcgtagccctgatacagcggcggatagtgaaggaagcagaagatggaccgtccctccgccgccttcagggaagtctccagtcttcccacctcccggttgaggaccttggcgttgtggggcttctggtcctcctcaaagaaccatccccgggtcccgcacagggcgtagtctccatacagggcgcagttgttatggagaaagtccagggtggtaaggcccttctccgtgaagaagttcttcattttggacaccgtggaccaccagtagtcgtggttccccttcaccagatactttttgcaggggaactggtccagaaagcggaagtccgcctccgcctcattcaggtcgatgccccaggaggtgtcccccgccaggaccagcacatcgccggcggtcagccggctcaaagcatcgccgatgcgctccgtgtaattctcccaggcggggccgaacacctccataggcttgtccgctgtcagggagaggtgcaggtccccgatggcgtagagggccatgcggcacccctcctttctctgtgtcccgtgaggcggagtcagccgtcctcttcggcggctccaactccccggaactctgttgatctatcttgatctgtgtccatctcgattttcacgctgctgacctttccccaaacgcgtccgcccaccttccggacgcctgtcttggtcagcagaatgccgggcagcttgctgccctccgggagccagagggaccctttgtagccttcgccccggatccgcccggcgccaattcgccgccgcaatagggacagcgccgctcctgtgctatggtgctctactcccctttgcgtttttcggttgggtcctccgggtcatcaaagacaatttccctgccgcacctgtcacagaagtgcttttcccccttccgccaccatggcatggcatacccacggccgcagtatgggcagcggaggtttcggacccactggatgcctccgttgaccagcagcacgattcctgtgatccgcagggtgtttttgatccaataggccgtgtccatcacccggtaccggtctcccagggtccggtagggaatcagctcgttgacagccaggaagaaaattcccaaagcaaagaacagcagcaccaatcgggcaaatgcccggctcaaaggcttcacgcaatagcctccctgccctctttcgggtttccaaaatccaaaggcaacagatttacagtctgccgcattaagccgtttcccgcgttgctttgttgcagcgcgatttacttcaaaaactccagcaccacgctgtccataccgggcttctcacaggtgaggtcgaaccgccgggccttgcccttcagggccgccaggcgccggggaatcgccgtgccggtggtttcatgcagctggtccagcagctccacgccgtcgcccgccggggtctccccgatggcccgcagcacgtggtcgcagaacttgtagggggaggcggtggagacgaacaccgtcaccgtcttgtcgccggtggccttgcggtactgttccatgacgctggcggccacggcggtgtgggtatcgatcagatacccgttctccttgtaatacttggcgatggcagcggaggtgcccgcctcgccgcagaagccgccccagaactggtccgccagagccgccttgatggcgtcggacacttcgtacttgccggtcttggcgagggcatccatgtagcccttcacctccgcatcgttttcgccggagaggtcgaacagcagccgctccaggttgctggacaccagaatgtccatagagggactcatggtggtatggaacggacggttcttgtcgtacacgccggtgcggaggaagtccgtcagcacatcgttgcagttggaggcgcagatcagcttcccaaccggcagtcccatgcgctttgcgtagtaggccgccaggatgtcgccgaagttgccggtgggcacacagaagttcaccttgtcgcccatgctgagcttcccgtcccggaccaggtcgcagtaggcggagatatagtagaccacctggggcaggatacggccccagttgatggagttggcggaggacaggaagtaaccccggtccgccagggtggcccggatggcctcatcggagaaaatgcgctttacaccggcctgggcgtcgtcgaagttgccctccacggcgcagacgcccacattggcgccgtcctgagtgaccatctgggtctcctggaccttggacacgccgtccttggggtagaatactaggatcttcgtctgcggcacgtcggcaaagccctccatcgcagccttgccggtgtcgccggaagtagccaccaggatgcataccgtcttggactctccggtcttgcggagggcggcggagagcagctggggcagcatctgcagggccatgtccttgaaggcgctggtggggccgtgccacagctccaggcagtgggtggtctcgtccaccgtgcggacaggggccacggcgtcgcagtcgaacttctcagggccgtaggcgttctccgcaaatccggacagctcctcataggtgtagtcggtcaggtacaggcccatgaccttggcagcccgctcctggtaccggacattcaccaggctctccaaaaaagcccggtcgatctgcgggatcccgcagggggtcagcaggccgccgtcccggctcaggcccatcttgatggcctccgctgcgtccatgcggacggcggcgtcccgtgtgctgtaatacttcatgtcgctctctccttctgactgtttttcaaaacgcattttccaaatattccagccggagggggcggtgaaccccatccgtataaacctccgccacatcgaaccgggcgggagcgtccaggtcgtgctgactgagatagcaggccgctgcggcccggagccgttcctgcttccgccggtccaccgcctcccgcggcaggcccgcgaagctgccgctgcggagctttacttccacaaagcagatggtgccgtctctgtcccgggccaccagatccagctctccgtaccggcagcgccattggcttgccagcaactggcagcccctcttccgcaggtactgtgccgctgcggcctcgccccggtcccccagggccttggtggtattcatgtgcgccgggcctcccacttcttcagaaaagtccgccggtgggcagggcagggaccgtaccgatccagcatttcatagtggagcttcgtcccatagcccttgtgtttggcaaactggtactggggatactcccggtccagcacgccggtcacataccggtcccggctgaccttggccaggatggaggccgccgcaatggaggcactcttcccgtccccgcctaccaggcacatgtggggcgccgtgatggagacgctgctgccatggtcccggttgccgtcaatgaggcacaggtccggccgaatggataacccctcaatggcccggttcatagccagcatccgggcgttgaggatatccaaactgtcgatctcctccgccgtcacaaaggcgatgctgtacgcctctgccgtggcggtgatctggtcgaacaggacatcccgcttcttcgtcgtcagctttttggagtcgttgaggccaggaaaaccgatctcccggggcagaatgacggcagcggcgtacaccggccccgccaggggcccggctcctgcctcgtccactccgcagagggccgtgagaccactattccattgttcacgctcataggtccagaggtccatttccatcctaccaatactccatgacgatcttcttgcaggtgcgacagacccaggcgggaagccatgtccggttgtagcggaacgtcatcggtccgtccagcacaatgccgccatctgcctcgatgttccgcctcgtataaaacgtgcggaggtctttctctcccggcatgaaaaaaagaccgatgctgttcttggtgatgacatggcccttttccatctcttttccgcagacagggcagttcatggatatgcctccctcctcgcagggcaggttccttcgctttccgcgattcccgccaagtgatgtcaatactccagaaggatctttttgcaggcgcggcagacatagccatgtacagttgcgcggtcgctcccccgtatatgatgcgggccatccaaaacaatcccgccgtactgttccacactgcgcttcgtatcccagaatcccacttttccgccgggcggcaggaagaaaaggccccgccccagctccgtataaaggctcccccgctccatctcttttccgcaagacgggcaattcataggcgcgcttccctcattctgacgctgcaggctgttccgtctcctccggcatttccagtgtgaagcgtcccagcttgccagctctatactcgtccaacagaatcttggccatccgctccgtgtccacctcgccgccggagatcagaaagccccgctttttcccggcggcctccagcaggcggtagccccaggccacgtcctcctcgccgtcctgacgctccggcagggacgggagcttgtagccggtcctcagggcctccggatagttggtgcccaggtacgccatcaggtggcagcccagggtctccatgtccaggatctcgtccttcaccgcgccggtgtaggccaggttcagccccacgctctggtcctcaaacttgggccacagaatgccgggggtatccagcagttccagcccgcggtcgatgggcacccactgcttggcccgggtgacaccgggccggtcctcggttttggcagtcttgcggccggcgatcctgttgataaaggtggacttgcccacgttgggcacgcccaaaatcatcacccggaccacccggttctgccccttttccgcataggcgcgcagcttgtccgcaagaagcgtcttgacagcagcggcaaactgctttgtcccggcgccgctcttggcgtcggactccatcaccgcgtacccctttgcccggaaccaggccgcccaccgcttcgtggcgtccgggtccgcctggtccacccggttcagcaccaccagccggggcttccccgccgtcagttcgtccacatccgggttccggctggacacaggaatccgggcgtccacgatttcgcacactgcatccacatgtttgatctgctcggcgatcatccgccgggttttggtcatgtgaccgggataccattgaatattcatagtcctacctcacgccgccccggcgggcggcgcccaatcaattcttctcaggaagctgtccccgtggctcagtcgatccccgcaatggggccgatgcggccgaagtcccgctgcccggtggcctcgtccgcgccgggaaacagcaggaacaccgccttgccgatgacataccgggtgtccaccgtgccaaggtcgctgctgcggctgtcgctggagtggtttcggttgtcgcccatgacgaaaatggagccctccggcaccgttaggggaaattccgtcccctcctccacataggtgggctcgttgatatagtcctcctccagcagctccccgtccacatagacggcgccggagacaaagtcgatgtccaccgtctggccctccgtggcgatcacccgcttcacgatgggctcctccagaaaggtgtccttccgcagcaccacgatgtcgccgtactcatagtcgttgtccagcatggcgttcagcaccagcagccggtctccgtcctgcagggtgggcaccatagagtggccatccacgccgatgagccggatgacgaaggtaaacagcagcaccaccgccagcacggagcacaccagcgcctgggcccactcatacaggtcccggccctcctccttttccggagacacctcctgcgtctcctgcttcttctctttcttccacatgtctgcaaaacctccgcgggcgctttcgcccctgttgatggaaagccccccgccggaggtctccttgctcttatgtcagcgggccgatcctgccgaagtcccgcttgtcggtgtccgcagtcacgcctgggaacaacaggaacaccgcccggcccaaaatctgccgggtatccaccggccccagctccggatcccggctgtcatcgctgtcgttgcggttgtcgcccataacaaagacgcagccctccggcacggtgacagggaactccagcccctcctccagataggtgggctggcggatgtagtcctcctccagcagctgcccatccacatagacggcaccagcggtaaagtcgatgtccaccgtctggccctctgtggcgatcacccgcttcacgatgggctccccgtccttgaagctctccttccggatgatgacgatgtccccggcctcaaatccaccgcacaggtgggcgttcatcaccagcaggcagtcctgatgctggagcgtctcccgcatggaggggccggacaccagcaccacccgcgccgcaaaggtgaacagcagcaccgttgctgtcacggcgcacaccagcacctgcacccactcgtacagcccgcggagggaaagcgcgtccctgttgagccgttttcctccccgcacgtgaccgcctcctccagcaccgcagtttttcacaataacgtatgctagtatatcaaagaaccgtcaaaatcacaagatgccggggaaattttgtgtgacaagaaaaaagagaggctttcgcctctctttcgtcttggatcacagcttttccttgaccttggcgcccttgcccacgcggccgcgcagatagtacagcttggcacgccgcacagcaccgttgcggaccacctcgatcttgtcgatggagggagagtgcacggggaagaccttctccacaccgacaccgtaggagatgcggcgcacggtgatggtctcggtgatgccgccgtgcttcttggcgatgacggtgccctcgaagacctggatacgctcacgggagccttccttgaccttcacgtgcacccggaccgtgtcgcccaccttgacgggggtcacttccgcttccagacgctctttgttcagttccttaatcagatccatggatgttcctcctaaataataggtgttcatgccgcttctctcaaaggcacatcaacgcactccggcgtgtgcacggcagaggaccaccctttgtagccgtaataggataccacggccaggaggaaaatgcaagtattttttacaaaaaatccgcctttctgccgtgcagttcccgaagagccgccgccagcaggccgaatgcagccggcagcagccacaggctcccgccggtccgcccgatcagccacagtaccaggccgcccagggccagcgccgtcgtgccccccgcccagcaggcgatgcgctccgcggcggagggacccgccagccatgcggccgcgagatacagcgcccggccgccgtccaggggccgcaccggcagcaggttgaagaggcacagtgacagatgggctcccgccgccacccaggcgtgggcgccccccagaaccagcgcgcacagcagattcactgctggccccgccagcaccgccgcgatctcccccggataggacaggcgggcggcggaagtcatcagctccgccccaaagacgctgacccgcagctcccgcacccgggcccccagcagccgcagcaccagcaggtgtcccagctcgtggagcgccgcggcggagaggatcaccgccagcagctgccagccgttcaccagtgtgaaccaggccgccagcagccagaagccgccggaaatccgaatccggtcacgccagcgagacatagtagatgggatttaggtactggctgccctcatggagctcgaagtgcagatgaggcccggtggccacgccggtctcccccacctctgcgatcacgtccccctccttcacagaggcgcctgaggaggcgataatccggctgcaatgggcatacagggtggagtagcccccctcgtgggcaacggtgatgtacttgccgtagctgctgctctcccccacggcggtgacggtaccgtcggcaaagcagccgatctccgtcccagcggcggcgccgatgtcaataccatagtggaaccgctcctctccctccaccgggtgctcccggtagccgaaatcagaggtgagggtgcccatcaccggggtgcagtaatcaaagcccagcagggcctgttccaggcacacgttgtccggcaggttctggtcggagtagaggacgtaggccagggtagacgcctccgccgcgccctgggatgcggtttccgcagtctccgctgtctgatcggcctctgctgtctgcgcggtctctgccgtctgggatgctgctgcgggcagatccagccagccgtcgctgctgccggtcccggtccggaaggcccgcaggggcgcgatggccgcaggaagctggagagacaccgcctctccccctgccggggctgacacctccacggcggaatcctcctgagggtcgaacaccgcctgatacatatcctgaagggccacgtccacatccgcttcgccgctcacggcccgccccacagcggagaacacggcctgcacatcgatgttctgttccagcattccggtgagcttggcattcacctgggccatgcgtcccggcagcaggagcttcaccgccaccagcagcacaaagatgctgccgcaggccaccagctggatcagatgccgccgctctcccggagtcagagtttcccgttttccccgctggaccctgtgcggcgcagccggggtactccgccgccgcctttccgccgcccgatgctgggacgagacggtgccgatccgccgcccaacgtgccgtgccgccatgacgctccctcccctgtcggaatctattccaaactctatgcgccgaccgggcgggatatgcgtctttgggaatcgtctgcccccgccgaaaaagagaccgggaaggggctcccttcccagtctcttgcacttgcccgctttgcggggcgttatcccagcaggcccagcatcgccgcacacagggccgtcctgtcccggatggaggggatgcgcacccgctcttccgtggtgtggatctgttctgcgatggcggagagggcgtccaccgtggggacgccgtaagtggagagataggccccgtcggtggcggcggggtccgcgatctcctccggctcccaacccagcagctccgccgcctctgccgcccggagataggcgctgtgattggcggcgttccgctccatggcggggaacagcgtccggtaggtgacctgcacccggcagccctccaccgtcacttggtccgccatgctgtccagcctggcctggatcaccgggaagtccgcgttttccggaatcccggccacgcagaactccccccgggcctctccggccaccacgccgttgggccgtccgccggagatgggcgccacattgtagtagatgcccttctcatagtcgttgaagctgtatagccggatgatctggtgagccagctccagcacggcgctgcggccctccagatacgccttgcccgcatgggcctcccgccccgccacgtcgacggttcccagaatcaccccccggcgggatgtgacgaaccggggacgtccgtcccgctcccggccgccctcgaacaccagggccagagccgcgtcctgcgcctcccgggcgtagaccttgcggccggaccgggagccggtctcctcgtcacaggtgaaaaggtacgtcagctcccaggggggcagcaggcccgcctttttcaaaatcagcgccccgaacagggagataaggacgccgctcttgcagtccccggcccccaggccgtgggcccactccccttcaatatgaaagtggtgcttttccgcaaagccggggccgaacaccgtgtccaggtgggcggccagcagcacctttccccggggctgttccggccgcacccgggccaccagatgggtccccagaccaggctccgtcacccgctctgtccgggcccccagctcggagagcaccggctccagcagcccggtcacggcggcgttgcccgcctcattgccggtgccgctgtcgatggcgcagatctgttccagcagcgccagctggcggggcagcatctcctccgccccggcccggacgatccgggccagtgtctgtctcttggcatcctccatcggccgtgcctcactccgccagcaggtccaccatgacctccgccggatcgaaggcggcgtcgatcatgcccaccttctggagccagtcgatgttctcctgccacacggacacgtcctgggacaggaagggcgcgtcggccgtctccatgatgggcagcagcacatcaaagcttcgccgttccacggactccgtcaaggggaagttctcctcgtcctggttggccaacaggagccccaacgcctcctccgggtccgcctgcatatcggcaaagcccttctgacaggcccgcaggaaccgagtgtacttgtcccggttggcctccagctggtcctcgccggtcaccagcatcagcgcgtagtagttgggtacgccgtagtccatgacctccatgtagtccacggcgaagccctcctcctccagcgcaggaacctcgtggttgatgaagcagccgaaggtggcgtccacatttccggtggtcatggcgctcatcaggtcaaagcccacgtcgatcaactccacgtcatccagcgtggcgcccacagtctccaacatctggcccaccgccacctcgccgaagcgggtgccggagtagccgatggtcttgccgatcaggtcctccggggtcttgatgtttttctccgccagggcacagacgatgctgatgggctgctggaccacagctcccagcaccttcaccggcacgtcctcattggccttggcgatgatggtgtcctcctgatagtagaagccgatatccgcccggcccgccgccgtcatggtcaggggatcgctggcgttagaggggaacaagatattcacctgcaggccctcctccgcaaagtagcccttctcctccgcctcgtagaggaaagcatggacggcgttgggataccagtccagcaccacgtcgatggtctccagctctccatcgtcctgcccgtccgccgtgtccccgcttccgccggaggagcagccggtgagcagcagaagcgccgtcagcaacagcgcaagtttctgtttcatcatcaatcttcctttctttataaactggatccaggtgattcctgcggggcccgccccgcaggtttcaggactctcccctccagcggacgaaccgcttttccagcaggttcacaacggccaccgccaggatggccgccgcggacagcagcacaataggggcgaacaccccggcgccgtccaactgggtcatcatgcggcgggagaagtagcccaggccgctcttggcccccaaccactcgccgatggccgcgccgatgatgctcatgggcaccgccatcttgacggcggagaagaagtatggcagggcgcagggcaccttgatcttcaaaaagatgtccttcttcgtggcaccgtaagtctccagcagctccgccatctccgtcttggcggagcggagcccgtcgtacactgtgatggtgatggggaaaaaggtgatgagcactgtcaccagcaccttgctccagatgccgtagccgaaccacagcacaaagagcggtgcgatggcggtggtgggaatggtctgggacaccaccacgatgggatagatcatcttgcggaccaggtcgctctcgtccatcaccaccgccagggccaggcccagcaccagagagatccccaggccgatggccgtcaccagcatggtggcgggcagatgaacagtgaagaggacatcccgcagctcccacagcttcgccaggatctgggtgggagacggcaggatataggccgcgtctaatcccatggcccccgcctgccagagaatcaacagggcgaagagaaaaatcatggcaggtagatttgctttacaggtctttttcatggggtcacctgctttcgcagaaggtcgatgagatgctccttcagctccaccatctccggcagtttgaggcaggagcggtcccgcgggaaggacgcggggaccggaatctccgccagctcccggatgggggtgcgctccaccaccagcacgctggaggagaggaacagcgcctcctccacgtcgtgggtgatgaagaggatggtcctcttgtgccgctgccactggtccagcagccactcctgcatggagatccgggtgaggaagtccagggcggagaagggctcgtccagcagcagcaggtcgcagcccgtcagcatggtgcgggcaaaggccgcccgctgccgcatcccgccagagagctcgtccggcatcttgctgccgcagccggcaagtcccacgtcggccagcgccgcctccgcccggtcccggcgctccgcacgggtcagctccccctggatctccaagggcagcgccacattttctcccacggttcgccaggggaacagcaggtccttctggggcatatagccgcagtagtgcttgcgtcccacaatggacttcccctccaccagaatggtccccgccttgggctttagcagtccgttggtcatgcggaagatggtgctctttccgcagccgctgatgccgatgatgcagtggaaggagccgggttccacggcaaagctcaggtggtcgatgatatcgaagtcctcgctggggtactgataggagacgttctgaaattccagcatggtcatcgctccagcgtccaggccatctcccagaagcccagctcataccggctgcagttgacgaagatctcctccagccgctggtattccgcctccgtgcagctctccgccagggtgtccatcagctccaccagtgcgtcgttggttttctggtagtcctcccccgcgtagctgcggatccactcgccgtagaaggggtggtccgccgcgccggggatggccgccaagcgcgtgccgatctccgcatagctccaggagcaggagaggatggcggcgatgatctccgccggcccgcccgcggcggcacaggagagcatgtagtgggtataggacaaattggagagggccggctggacagaaaacacctgctcctccgtgatgcccaaccgagccatgtaggcccggtggaccttcatctccccgcccagaatcgcgtccacattggcggagaaggtccgcatcaggccggggtcccgggccttcactacaccgtaggcgaacacccgggcgtagtcgaacaggtacagatagtcctgcagcaggaaccaccggaacttctccaggtccaggctgccgtctccaatcccccggacaaagggatggtcatggcactgctcccagatgggatgggcggcctcgtacagccgctgtgtcgttctcattcgtattcctcctatccaatggccggtccgcccccatgcaaaaaggcggggtcccctttgggacaccccgccttcgctccaatcctatctcttccgtgcggaagagactccgcacgaatagcttgtgctgcgtccctacgttggcattacccacatcaggtcaggtcgagggaccggcccctcatctcagcctcctcgcggaagctcccttgcacgttttattataaaagcccgtcttctttttgtcaataaatttttcccggttttcggtaaaaatcccgcatttacaccagatgccgctcgatctcctgccgggtgggcagggaggggatcgcccctctgccctgaacacagagccatccgctgacgttgccgtactccagcgcctcctgcaccagcggctccgtcagctgctccgcctgggtgacaccccggaatcgcatctgagacagcattccgccccagaaggcgtctccggcgccggttgcatccgcgcagtgggcccgccgacccgggacagcgaggcgccgcccccggaaatatcctctggcaccctgaccgcccagggtcagcaccaccagcgtcaatccgtaccgctccataagggcgggcagctccgcctcgccccccagcatatcggcctcctcctctgagatcttcagcagatccacgtccggcaggatctcccgcacctttgcggcgcaggcctcctgactgccgttccacatcatgtcccggtaattcacatcaaagctcaccagcctgcccatctcccgacccaggtgcagggccttggctgtggcctctgccgctggggaggcggagagagaacacgacccggcgtggacgatcaccgtgtcccggatgtccgcctcccgtacgtcctcctcccgaaggaacatatccgctccaggcttgcggacaaaggtgaagctccgctccccttcctccgtcaaagagacaaacgccatggtggtgaccgcctcccggcagggctcccgccggatacagcgcaccctgttttcccggagggtgcccagcaggtaccgcccgaagtcgtcatcccccacagagcagcacatggccgcctccaacccgttccgggcggcggcgatggccacatttgcaggggcgcccccggcgtttcgaatatagcttccgggctcactgcccggcaaaaagtcaactagcatctcgccaacgctgtaaaggtccaccagtggtcctccttgtctgaggtggttttgcaatcattcgcatcgattattaaaccatttccagcgttcaatgtcaatcgtttagctgatgtttttataggagaaaaatgtactttttgtgggatttccgatattgcggcaagccgccccgggaaatcacccgttttgaagaggtagctcccccgagaagatccgggcgatcccgccgcaggccgcccccagaagcgctccctcccccaggaagcgcggctttctcaccaggactctgccgcccccatccgctgggcgcaggcgggcaatggcggattccagatccgccacgtgccggtcggtccagcagagtccgtcgccgcccagcaacaccagttcgctgttcagcagattcagggcgctggcgatccctgcagccagaaagtccacggtctcccggaacacccggtctacttccccgctgccggttatccggcagaaatcggcgtaggaagcctccagtcccgttcgatgatacagttttttcagcacctccggcgaacgaacgtacagctccaggcagccacggccgccgcaccggcagggacggccaccggcgcagatggtgacatggcccagccccaggggccgtcctccccggcccctgcacagttgcccgccgctgaggaccgcgctgcccacccggtcccccaggctgacaaacagcacgtcccggcagttccgggccctgccgaacaggctctccaccagcagagcgctctggcaggtgtcctccaggaataccgggaggccgtaccgctcccggactgccggacgcacggattccgagggacacatctgctccccgccgggccgccagggcaggtccgccgccaagccgatggcccgtacaccagccgtcccggacagcatcttgtccaacagcctgagagcggtctcccgccgcaccgcctccggagcgtccttcggcaggtccgtgccagcccgccggaatacccggaggtccagcccgcacagaacactctcacaacggcccgggaggaacgccacgcccgctgccttcggcgcttcgggtgagagccggaggcgcacggggttccgccccggctcctcgctgcacaccacctcgctctctcgcaggacatccccgtcgatcatctcacccacgatattggagatggtcattttgctcaagcccgttctcaccaccagatcccgccgggtccggcatgcgccggtggcaaccatgcgcaggaccaatccgcggttgtcccgcctgttgtctccgctgttttttcccgctttctccagcatgacctgtcctttcccgcgatgcctgtcaaacctcccgtgccggagttcgcctccggcattcttcatttgtttactatatgacgctcccagaggcccgtcaagaaaaaccgctcccccacccggaggagcggtataggacatcatctaaattctgtcccatatcaccgtcccagcagggcagccccgcccagcagcaccccatagactatcggctggtggagcatatataccggcagggactgcctgcccaaggcacacaggggcggacaccggagcgcgtccggatccagccgctccatcggcccggccagcaggcggcggagaaaatgccccgccaggaacaggaacagccagggcagcagggagaaataatccgtggagaaaaagtccggcggcggaaatcctatgtacgccgtcagcagattacggtaaagtccctccggtaccgttcccagcgtccagtcctcaaatcccagcgtcccctggttcacgttccgcagcagggtgaacaaggccgcgctggcggcgaggcccacccccacaggtacgtgccgcagcagtttttccagtgggaccatcagcaacatgcaggagccgatcagcgtcagcacgccgaaccagatctgctcctccggcatgaagagcaccgtcaccagcgtcaccacccagccgcagccgaacaccgtcagtcccctccggaggggccgccgccccaggctgaagcaaaatccggagaggaggataaaggtccagcagatgctctgctgccagatgtacgcgccggtgccccggtaccaatcccagtccgcgtggaacagatacaccaagtcccagcaggcgtgataggcgatcatgctcaccagcgtcaggccccgcagggcatccagggaggcgatccgccttctgggccggaccagtgtccgagtcccgctgtctgctgccatcttccgctcctcctctccggcgaccggcggaaccggtcgtctatctcactccggggtcagccccggtgctcccgccggtactccgtggggagctgtcccgtcacatccttgaatgcccgggtgaatttcccctggctctcgtagcccacggcggccgcgatggcggcgatgctcccgccgctctcccgcagcagctccatggccctgcgcacccggtactctttcatataggtggcgatgggcaggccgtacaccgccttgaacacctccttcaaggtggaggtgttcagcagatacctgtgggagagctcctcaatggtgtaccgccggtccaggtgctcggtcagcaatgcgtggatctcctggatacgcgccgtctgctgggagccgtaccgggtcagctcccgcccgccggactccagcccctccaaatacagcagcagctcctggagcttcagccggagatagggcagccgccgcatctccggctgccggtacaggggccggaagatctcctccagctccggtcccgccggaagggcgaaggtcccgcctccgcagaatttttccgccagcctctcggcctggaagtccgcctccgccaagatggggggcggcgactccgccagatgggtcaaatctacgcagatcatcagccccgcgtacatctccgccgggaagtgcatcacagaatccgcgcagcagtccgcactgtggagggacagatcgccctcccccagatagaccgacatgccgtcccgcaggtcccagcccacccggcccaggcggcagtggttgatctccagcgtggaccgggccgcctcgtgccggaaggcggcataggtgcccaggaccgtgttgaaggacgcctccacccccggaaagaccgggtagacctccatccgtccccgtccatccgtctctccctgaaatgtcccggtgaacaaaaccccaggttcggccgcagggcgccccacgatctccatagtcccctgcggcagctccgccagagccatccgcaggcaatccgcttgcttcattccgccgctccttcccacctcacgccgaggggcaggcaatctccaccatcgcctcaatcatgtggtgcagcagctgggcccgctccgtctcggcagccttatagtagacctctttcccgtcccgccggctgacgatcaggccgccggccttcagctgcttcaggtggtgggacaccgccggggagctcatctccaccatggaggagaggttgatgacgcactcttcacagtggcacagcagccaaaaaatccggatgcggctgccgtcccccagctgtttgaagatgtcagccactgtctggaaatcgtccacgctgggcatctgttccagctcccgctccatggactgtccatggtcgtggggcagcttcttttcttccatcggtcgtccctccttctggttttgtattctaccacaccccgcgccattctggaagagcgaaaatatgccgccccgcattggcccaatcggaaggagtttttgcccaatcggaagattctctccctcccccgttgacttggggggccgccccgtgtatgataagaccatagattaaataattgcttaatcgttttgctcaattgctgaagggagacttttatatgaaaaaaacctataagatcgatgtggactgcgccaattgcgccaacaagatggaggaggccgcccggaagaccgaaggcgtccagagcgccaccgtgaacttcatggcgctgaagatgatcgtggaattcgcggaggggcaggaccccaaggccgtgatggagcaggtccgcagaaattgcaaaaaggtggaggacgactgcgaaatctacctgtaagcgcgtttttcaggaaagcaccccctccggaggcggggtgttttctttcccaaaacaattaaacgtttattgaattatcagccgcacggagcggctcagatcggaagtgaacctcatgaataaaaagcagaaaatcatgctgatccgcattctgacagcggcggccctgctggctgtcctgcatgttctccccgtcacaggctggatgcggtttgggctgtacctgatcccctatctgatcgcaggttacgacatcctgcgaaaggccctgaagggcatccaaaaccgccaggtgttcgacgagaacttcctgatggccgtggccactgtgggcgccattgccctggccctgtacgagcggagcggggattacaccgaggccatcgccgtcatgctgttctatcagatcggcgagtggttccagagctatgcagtaggccggagccgccggaacatcagtgagctgatggacatccgcccggactacgccaacgtggaacaggacgggaagctggagcaggtagacccggacgaggtgtccatcggcaccgttattgtggtccagcccggcgagaaggttcctatcgacggcactgtggtggagggcgcctccaccctgaataccgccgccctcaccggcgagtccctgccccgggaggtccgggagggggacgagatcatcagcggctgcgtcaacatgaccgggctgctgaaaatccgtaccacccgggaattcggcgagtccacggtgtccaagatcctggacctggtggagaacgcctcctcccgcaagtctcggtcggaggacttcatctctcggttcgcccgggtgtatacccccgccgtgtgtttcgccgccctggccctggccatcctggtccctctggcccggacgctccttctgggcctgcccgccggctggagcgtctgggtctaccgggccctcaccttcctggtggccagctgtccctgcgctctggtcatcagcatccctctcagcttctttgccggcatcggcggggccagcaacgccggcgtgctggtgaagggctctaactatctggagactctgtcccaaaccaaaacggtggtctttgacaagaccggcactctgacccagggcgtgtttgaggtcaacggcatccaccatcatgaaatggagaacgagaagctggtggagtacgccgctctggcggagagcgcttccagccaccccatcagcaaaagcctgcagcgggcctatggccgggagatcgaccgcagccgggtgacggatgttcaggagatcagcggcagcggcgtcatcgccaaagtggacggcgtggaggtagccgccggcaacgacaagctgatggaccggctgggcgtgccgtacatcccctgtcacagcgtaggcaccatcatccacatggccgtcggcgggaagtatgccggacatatcgtcatctccgacgtggtgaagccccacgcccgggaggctgtccaggcgctgcggtccgccggtgttcataggaccgtcatgctcaccggcgacgccaagccggtggcagaccaggtggcccagtccctgggcatcgatcaggtttacgccgagttgctccccgccggaaaggtggaaaaggtggaagaactgctgctggacaactctgagcggggaaagctggccttcgtgggggacggcatcaacgacgccccggtcctcagccgggcggatatcggtattgccatgggcgccatgggctccgatgccgccatcgaggccgccgacgtggtcctgatggatgacgatcccgccaaaatcgcaaaggccatccggatctcccgcaagtgcctgcggatcgtctatgaaaacatcgtctttgccatcggcatcaagctggcgtgtctggtgcttgtggccctggggttcgccaatatgtggctggccatcttcgccgatgtgggtgtgatgatcctggcagtgctcaacgccatccgtgcgctgttcgtcaaaaagctgtgaacgcggaaagcgccccgtccaaggctgcacgggcatgtcccggagtccggcggcagagccccaggcaaaggcagccctccggtcaagcgtgaagggaccaaatccgcacaaaaacccggcgccgggaattcccggcgccgggttctgtatgtacagaccaggtcaaaatgcaaagagtaaatgtcatttcagtaaaattgaacacggccatgacgttccctgcttattggtgaatagcctggaattccgtagggaactgcagcttatgtgatcacaagattttcaaatcatgtgttcttttctttcctggtgttttcaaacacccagaatatagcgcccagaatcacaatcccaccaattatggagcttttgctcagggtctctcccaaaaaggcatagctgaacacggcagtgaacacaacaccggaatactgatagatgctgacctcagaggccggggcctgctgataagcgtatgtcaggaagaactgtccccctgccgcaaagacgccgatcagcaaaagcatcacgaatacctttggagacggaatcaccagattcggcagcatcatcagtcctgcgcagaccgtactcagtgcggaaaagtggaagataatcgcagatgggtgcgtgaaatttttacagtaggacaacatggtgtaagccatgccggataccaccgctgccagcaaagccgccagaagcgggaacgggttggagtcgaaggacggctgcatggcgatatatgcgcccacaagacacaggatcgttgaggcgatcttgacgggagtgatcttctccttcaggaaaataccggcgagcagtgtgacaaataccggagatgcccggttcagcatagctacatccgcttggcgggcgtgaccggccgcatagaagaagagcacgatccccagaaagccgaagaacgaccttccccaaagcgcccagccccctcgtttgatctcctgaaaaacctgcaggttttcccgtcggaccataacagctgcaataatcaggctgacaagattgcggaagaaggtctgctcaaatgtccccacctcttcagagctcaatttgacaaatacctgcatgatggaaaaggacagcgatgagaccagcatcaaatatatagctttggttttttgtttttcgtaatcagtctctccttttatatggcaacatacagcgtggccgtctgcacgggaaatcagcgcagacgaccggaatacacttccggtcgtctgttccgatcccacccggggcctgcgcagcagaaatcaatagtcgccgttgtaactggttccgtggggcgttgtccagctataatctcccagcttttccgcctttgtctcctcgccgttggccacacgcagaagcagctcgtaaagctcgcggccgctttcttgcaggctcagttccccatacagcatgggagctgcggagtagtcgatcatgtcctccagcgccgtcgcagtctgggggttgcctgtgatcttgatggtcgtcatacatgcgttgccgatggggttgccccgcccagtggtgaagaggcagatatggcatccgctcatggccagcgtggtggacgcataggcatcattggcgccctgtgcctggttgatgccccaggctcccgcgccggggaccggatcaccgcagtccaggatccccaggatccggcgatgtccctgggttttgaagctgcccaggttcttctcggtcatagtggtcagtccgcccgccttattgccgggagtgggattgacctgggagaggcccttaccgcctctgcgggtgcagtcctcattgaagaaatctccgatatccatcaggcgcatgccgatctcataagaagccgctgtggtgggatagccgccgcggccacaaacctccaccgctcttccgccggcggacaggtgcatatcgattgcctcacccaccaccggattggcggacaggccgctggtccagtcagatccgccgttatagccgccgataatcagtccgctgagggggcagggttcgcgcttctgggcctctgcctgccgcttcagatcctccacagctgcaatcccgtcctggatggccttggtgacaccgccgtccgcctggatgctgatattcaccaccggccggccagtcttacggatctcctccgccacatcttcaggatctgtctgctggcaccccagggacagcagtaccacgccaaaagtgttcgggtgcgtgccggttgtgatgaatcctctgcgggtccgctcaaagcgatccggaaactcaccgcaagccgcatcgacaaacgtggcagggacattacaggcagcagagatccgctgcgccgcattgttggagcactgaaccagagagatcaccaccacctggttccggatcccaaaggaaccgtctgcccgcttatagcccatgatcgtctccggcaggcccaactcttcctttttgtatttatggtggatcgtgtaatccatggcatccggtgccatggagcgatagtaagcacgctgttcccggttgatttcctcaaagtcatcgtaaacattgtgctcatgtacccagtctccctttttgatgaactgggtggccacgccgatatgtacaccatacttgatgatctcggctcctttttcgatatcagtgcgggcgattttgtgcccctctttgatatattcgttggccgtgatctcctcaccagccactagtgtgcactcacccgcctggataggctctacggcaactgcgacgttgtcgctctcctcaatcagcatgctttttttgtaaattttcattcctgtttactcctccagtaatttaggattggtgttctcttaccgtaatactgcggcgatgcgatccatgatctcctcgatcagatttcggggtgcagccaggttcaatcgttcaaatccatttccctctgggccgaacatactgccttcgtccatcgccacatgggcctgatacagcatcttttggcgcagtttttcggcatccggctccagtctccggaagtcaatccattggagataggtcccctccagaggggagatcttgacgtctccattccaagtatcttccgcaaactcccgaacgaactggtcatttttctgaatataagccaggcatgaatccagccaggcttccccgtggtcccaggcagcctttgcagcaacgggggcaaaaaagttcggatgggcacgacaataccgtgcgaacatctggtcaaatcgtttccggcgttcctcattggggatcataatgcaggaaaaagaaagccccgccagattgaatgttttggatggagcatggcaaacggcacagttttccgcatagtcctggcccagcgaggcaaacacgatatgctggtggcccgggaagatcagatcgctgtggatctcatctgcgattacaaacacatgatgcctgcggcagatctcgcccactctgcggagctcctcctccgtataaacacggcccaccggattgtgcgggttgcttaaaacaaaggccctgcatctgggggatgccgctttcctctcaaaatctgcaaagtcgatctcatagcgcccatccctgagctgtaacggactgtttacaacaacccgtttctgctgctgtatcgaatcagcgaagggataatacaccggtctctggatcaggacctcatcgccttcctccgtctctgacagcagcaggagattgatggctgtcacgacaccgggggtaaaacggaaccagtccgccgccgcattccagccatttctccgttgctgccagcgcagataggacgcaataacctcatcagtgactttggtatatccatacatgccgttcttagctgcctcaatgatggcttcctgaacctccggaagcgtcttcagatccatatctgcaatccaggcgggcagaacgtcttgggttccaaaagtcttttccagttcagctggctcccacttaacctgcccccacggcaggcggctttcaaagtggtcaaagtcaaacgttttttccatccttacctctttctgatcctaaatcgggatttatcacaggccattaatctccctcacaaaatggcatttgacaaaatgatccttttcgatctcttccagctggggctcattttcaaaacattccggcttcgcatatacacatctgggggcgaagcggcaggactttgtcacgttgataggcgaagtgatctcacccttcaaaatgatctgattatccggcgcattgtacttgggcagcgggatcgcagaaatcaatgcctttgtatagggatgatattggtgggcaaagatctctgcggatccagccttctctaccatctgtcccagatacatcaccgtgatatcatcggagatatgcttgaccacggacaggttgtgggtgataaacagatatgtgagattccgctccttctggagctccatcatcaggttcagaatctgtgcctgaatggacacgtccaaagcagagaccggctcatcgcagaccaccagcttgggatccagaatcagcgcccgggcgatacctacccgctggcggcgtccaccatccagttcatgcggatacaggccataggttctctctgccagtcccaccacatccatgatctcacggacttttttctgctgctcctctttggaattgcagagcttatagatcttcaaaggctctgcgatgatatctccgatggacattctggggttcagagatgcgtagggatcctggaaaatgatctgcatatccttgcgaagctctttcagctgcgccttggtcacgtccgagatatcctttccctgaaagataatccggccgcctgttctctgatgcaggtgcaggatcacccggcccagtgtagactttccgcagccggattctcccacgatccccagcgtctgtccctcccgcagaccgaaggtgacgccatccactgcatggagtgtcccctttttggtggcaaaatactttgtcaggtcttctactcttaaaatctcagccatactcaaacctccgtgtcagaaaaacggttgcagcggaccatgtgagagtccgaaagcttcaccggcttgatttttccggtctggcaggcttctgtcgcatagggacatctggggtggaacttgcatccatccggaaggtttgcggggtccggtaccatgccctgaatcactttcagcgtagatgcgtcgttctcaatatccggcagagagtcaaacagaccgatggtatacggatgccgcttatctgtataaatttccttgagggttccggattccacgatctccccggcgtacaccaccgcgaccttgtcgcagatcttcgccacaacgcccagatcatgagtgatgaggatcagggaggtctgatactcctgcttcaattttttcatcagctccagcacctgcgcctggatcgtcacgtccaaggctgtggtaggctcgtccgcgatcagcagctctgggctgcaggccagggcgatagcgatcatcacccgctgcttcatgccgccggaaaactggtgggggtagtcgtcgcaacgggcgccggggatacccacctgctccagcatctccatagcacgcttccgggcctcggccttcgagatcttgttgtgcagcaggatcacttctgcaatctgatctcctacccgtgtcaccgggttcagggaagtcatgggatcctggaagatcatggagatctttccgccgcggatccggcgcatctgcttttctgagagtttcagcagatcctctccctcaaacaggatcgatccctttacgatctctcctggcggatccggcaccagccccatgattccaagggccgtggtggtctttccggcaccggtctcccccaccaggccgatactttcgcccctctccagagaaaaggtgatgtcattcaccgcctgcacagtttcctcgtctgtcacataacggatttcaaggtcgtgcacttccaatatattttcagccataccgtactcctttcaccgctcacttcttcaatctggggtccaggcagtcccgcaggccatctcctacaacgttgagtgcatagaccaccaccatgatggcaaggccgggaatgaccgtgaggtaaggttctgtccggatgtaccgccggccggtggacagcattgcgccccactccggcagcggagcctgaatgccaaatcccaggaaactcagagcagaagcggaaatgatggcgcccgccatggccagtgtggcctgcacgatcagagaggaaatagaattgggaagaatgtggtggacaatgatacgccagttattggcgccgatggctcgggccgcctcgacaaactcctgttcccgtgttgacataactgctgcccgcaccacgcgcgcgaattttggcgtagaagacaggcccaccgccagcatcaggttgaacaagctggaacccagtgccgtgacaatgcacatggccagcagcatctggggaatggccatgaacagatccatacagcgcataatgatattgtccagcttgggatagtaggctgccaggacacccaaaattccgcctgtaatgacagaaattccaaccgccaggaagccgatggccagagaataacggctgccatagatcaggcggctcaactggtcccggccaaggttgtctgtgccgaaaatatgctctgcgcagggcgcgatcatggcacggctggcatcctgatcatcatatccgtatggtgcgatctgatcggcgaaaattgcgatgagaacgaaaaggatcaaaacgatcagtcccaccagcgcctgcttgttctttttaaaacgtctccagatttcggagagcatactgtgatttttcatgccgccttcttctctcctctcttcttgaaacggaagaacccgctcttggagctctcatacatggtcttcatgcgggggtcaataaacgtgtagatgatatctacaatcaggttcaaaatggccgagacaaacgcgatcagcagcacacatccctgcacggcagcatagtctcgggcattcatggaatccaccaggtactttcccacgccattgatggagaaaatcacctctgtgacaatggagccggccagcagaacacctagctgcagcccgattacggtgacaatggggatcatagcatttttcaatgcatggctcaggattaccatccaataagtctggccctttgccttggccgtgcggatatagtcctgccgcataacctccagcatggagctgcgggttgtccgcatgatagtggcagaggaattcacgcccagcgcaaccaccggcatgatcatctgcgtccagctattcccgtagcccgaagccggaagccagcccagtccaacggagaaaatcagaatcagcatcaggccctgccagaacatcggcatggaaattccaaataaagcgcaccctgtgcacagagagtccagaatggtgttctgtttcagagcagctacgattccgaagaatattccaagtataatgcccagaacaatgctccatgcggagatattgaatgttacagagaagcgcacgagaagttcgttcaaaaccggagttctggagcggtaggagattccaaggtccccctgaaacaggcccagcagtgtccttcccagccgctcccagtaggtcccgttgatccccatctcaatgcggtatgcctcaacagcttccggcgtggcgttatctcccaaggccagataagcaggatcaccaggagaaaaatagagaattgtaaaaacaacaatggttacaccgatcaatatgggaatgatccataagattcgcttgataatgtatttcagcatggttcgttttcctcactcaaccagcgcggcgccccggaggccaccgcttttttgtactgtcatgtaaaaaaataggatgggtgaataattgttgtattatccacccatcccttggatcaaatcaaacccttaatccggagaatcattttacgcgaagtagcaatacttcagcagcggagcctggaatgcgccattgcggaagccctgcagatcgctggtgtagcagtggatatcctcctgctgatagatgggaacgatgacacattcatccagcaccttctgctggatttctgcattcagttcgctgcgctttgcagagtccgcctccatagcagcagcatcaatcagggcatccatctcaggatcgctgtatccgaagatgttgttggcgttatcggtgtagaagaatcggttcgcatagtcaatatcgccgttggtggcagagatgccccaggtataaatatcgaagttgtgctccaccttcaaagcctgagagtttgtggcagcgtccaaagcaacgatctccacatcaataccgatctgccccagtgcattggcaaagaactcaccataggcctgacgcacagccatgtggcccacgtgatatctgcaggagaacccgtcggggtaaccggcctctgccagcagttctttggccttctcaagattatattcatagaccggataatccacatgatagggagagtccacatccgcgatggaatcaggaatattgctgggcagcaggccttccgcgggctgaccgacaccgtccatgcagacctcccatgcaccgtcaatatccagtgcataagcgatagcctggcggacacggacatcgtcaaagggagaattccgcagattgaagctcagatagcagttgtccgtcgtatactcacggaataccacaacatcagaattggcctcggcagcctcgatatccacgccggaaagattgtagcacatatctgcgccgccggtctccacctcgatgtagcggttgccatcttcggaaatcactctgaattccacattcttgatggcaggctggccctccacatagtagtcgtcgaagcccaccagactcacgctgctgccgatagaccattcgccccaggtataaggaccggtaccgatgtccatattggcccaatccccgtttccttcctcatatcccttctggctgaacatcacgcaggtagggaatgagaggttggcgattacaggcatatagggttcgtccatcacgatgacaaaagtcctctcatccaccgcatagctgttttccagatccatatggtcggtaacagaggtgttggagctctcccgcaggcagcgcagagagaagaggcaatcctcggccgtcaaaggctcgccgttatggcacatgacgccttcccgaagagtcattgtcagctcagtggcatcatcgttgaattcccaggattcggccagaagcggcttgtactctccttccggcactgtgcgctcgatcagggtctcgtagacatttgccttgatcttcaaagtatcattggtgctgcttccgttgatagggtccttgtctgccatatctgcctgaacggcaatagtcagagtatctttcgcctctcccccatcatcgccgtttccggcatcttctgtgccgccgccacatgcagttgtcaacatgcagagacacagcacggaggaaaaaatccgcagcaacttttttttcataacatctcttctcctttttcatattttacaatcaccggttttcaccggaaactgccatttttgttgccccctttaaaaccggtcatagctgacgatttcttccatattcttttttgtcttccgggggctgttgtccgcaccatatccgagcgctaccatagatacgacccgcgcagatgccggaacatgcagcaaatctttgaccgcatcttctctaaatgcacagatgatacacgtatctaacccctgttctgccgcttccagcagagcaaatcctgtggccagagacatgtccactacatagccatattgcccgcagggcattacaaaatctgtgcggtccgtagcgcagaacaccaaaagtacatctgcttcctccaccatgggctgtgtctcagcctgctggcggatctgctgcttcaaggcactgtcccgtaccacgatcacccggatattctgatcgttatgtcgggaaggcgtcaggcggacagcctccagaactgcattgagtttttcctgttccaccttgcggggcagatagctccgcacacttcttctagccttcatggcccctatgacatccatgccttttcctccaaaagccgctggtcagcggaccatctcctgaatctcctccagcgtcttgccggccatccccagcttttctgcggtgcgtccctctttccagaagtcccgaccgcagacagcactggcgatattgacaaaggcgtccatcatcggggtggggatgcccaatgcatggcccacggaagccagaggtaccaagccggacatggtatcctccacgatgaaccggtgcttggtattggtcgggttgcgcagagcgcgataggattcgatgctctgaatcagatcatacaggctgtccttcggctccagcttgtaggtcttgaccagcatatccccagcgccagcgcatccacgcccagcgccctgcatacagcgacacgctccttgtcgcaagcggagatgatatcggcaatatgtggggtgattccctccatgtaatagtcgtagctctgccccagatccatcttgttgatgttcatgaggctggggatggggtgcagcatggcgccggcgccctcaaagccggtctccagcacattggccgcaggctgcaggcaggggaagatgggtcccagcactttcatcaggcggtcgatatcactggcgggcagtgtcgccaccggcacgtggaccttcaggcccgtgtgaaggatattgccgacctcataactgcggcagccatacatcaggtcccccgcctccgcaatgataagatccttgccgcagccatcctcgccgcgcaggatattggcgatctccagagcacctccgcagtggccgggattcagcatgacgatctgcccatccttcagatagggcttgcaggcataggcgatgcttctatgggcatccgtagtagagacgaccatgatcacgtccacgtcatccatgacttcatcgatccggtccgtaataaccgccggtgcggcctcgcaggcaatgacgccggtgaccttgattgttttgagttcctgcagacgatggattttttccttgtcgatgtcatacagcttggcgatatagcccttgctggtgagaatggcggccatgctctgtccgcctgcgcccgctccgataatcgcaaatttcaacatcttgattccctccacatttcattttcctatggaatttgaacaaacgtattttgctttgaaaaaatacccaagggcgtttctccttaggtgttgtttccatttccaaaattaccgcggcttctatgcctgattgaaggtgatctcgtcagctcttttcctgtccgtactgctcctctctgcaaacattgtgttttttgtctgatcctgtcctgttttgcttgtcttaattttatcacattgacaggaaatccgtttatatggtattgttagtactaaatatatgaatttcatatctttacgggcacacttcagggagactgtctctcccgggcgcacgccggatctcctgtccgacttccgcgtttttccggactgtgacaggacattggagagcaatcccaaaggcccctcagcaaactgggcggaaaatgccgaggctgtctaggggggcattattatgtacggagggaggatccaacatgacgttccaacagctcagcttcgtggtagaggtcgccaactgcgaatccatcaacaaagccgccgagcggctctatacgtcccagagcaatgtcagcaacagcatcaaggccttggaggaagaattgggaatccagatcttccttcgaaccaaaaagggcgtttccgtcacggaagaggggcgggagttcttgagctatgcaaacgagatcatagacaaaaaaatttttgtagaagatctgtatgcaaagagccacttccgcaagcagtatttcagtgtctcttccatgcgatccttctttctcagcacgcccatcacaaggctttggccgcagatttcagacggccacggcggctctatctatatcaggctgaaaaaacagtctttttacgatgttctggatgatgtgcagcactgccgctccgacctggggatcgtcttcctgatgaaatcccacagtaatcggatcacgcggctttgcagcgtaaaggacttggattaccatctgttgggggagagccatatcagcatcgtcacgagagcggaccaccccattctgcaggctcaggagaccgttccggtggaagaccgtatgacggactatccctatgtgattgcagaaaaccacgagaatttcggcagattttacgatgatgattccgagtccatctctcaactgtttcagtctcccccaaaatgcatcatctctattaacgacagtgctgccagccaggatattgtggcccaatccgatgcttttttcatcagttctacccgctggcagcatccgcagcactaccatttttcctcggtcccgcttaagggagaagatagtatcctggcccattattatgtcaccaagaaggggcagacgcctcaccctttgaccgctccctatgtggaagaactgaaaaaaatgttccatggtctttaacgaggatattccgacatactgagcaaacagcgacatggagcagcctccttccatcctcaaatctccccttccgaaacacttctctgcccagtctcgtctcggcctcgcatcctgtgccttttattacataaaacctgcttgctccaggcggagattcagaaactgctgatccagagtataacttggaccatccttgctcatccatacccgggatttttctcagattttcttctataaaagaatgatgaatgagattttttctggcgtggagggtgttccggacagctacttttccctgtggatgaccgttggccgcatctaagcgggaactctgctgggctatggtatctatgcggcgatagcccccagaataaggatgtccttccgagtctcgtaaatacggacagcatcgtcccccccctgccctgttccgtaaagagtggtctatccttcagcccgtctggagttcctggcaggcgcaggatatggattttacgggggcaatacacagcaagtaattggctggacataggaatatttacacaggtattgaataagatcggacgccgcaccaatggacttttggtgcggcgtcccaatatattcttcaaaatgacagccccgagatagatttctaatgtttctgagccaattgtttatgaatgtgttttgtctggggacaccggaaattttatatttccgcttctaacgcttctgcaaccgtttccagcagatcacgggcggaagcctctgcgggcaattttctcccgcaggccacagcggatgcagtcggatgcctttctgtaagtctggggcagagccgcataatacgcctcctggttggcagtgtagcccgtgttgttccccaatcgctccggatttctcatgccgcttaaaacagtcaaagccccgtccagccccgcaatgagccggatggaccaggaggaggccggtccggcggtcgcatcagcttggtacagcagcacagcggcctcctccggtaagttcatcagagcacctcccttcaccggctccacgaccgcaatctctttcccgtatctccgggccacctcatcgcacttccggcactggagattgggatccctcccagtccggacagttgcgctgaagctgcaccagctcaactatctggatgatcttgggggatcttctccagggcctccgcagctcttcggaaagaacaactgatatgctgcgccaactccttgtctcgcatttcacggggaaaccggaagctgccaactggatctggtccgggagccggatcgaaccatgactgtgtggtaaaagggatcgtcatgtaacccttgtcatgcttgccctcagagcactttttctctatgaattgatgcgcagcctcgtttacaggggcattggggagatatccacccatcagcaggaaaagttctgtaacgaagcggaattgcggatgtaaatatctatttgaccagactggtaaggcgatgcatcaataccggcaaaagccaccgacgccgtcttggagtggaaacggcggacatcgccaatctccgccataagttgtgagccgagcgatggaccaacaccaaatatcctcatcaccacgggatattccgggcgtgaagatgcccaagatcgcatttgcagttttgcagtttcagggcggccaatgctgcacaggccgtccggagttgagagacagcccgttctgccagaagtctggcagtatcagttttcggcataacaccaaagtgactacgggcagaagcataaatatccaatgccctatcttcgctgaagttgtagctatatttcttacaccacctttggtatttggaaataaatgctttttcacataaaacgcaaacgcactcacagttccaaaatgtcgctgcgaagtccaccatttctcgctgccatcggtacgcggagggcttgaaaacaggcggtttgcgcccggaaaagctgtgtctaacagagagatcaggttgttcttcaacttttgaatacggctggtattgcctggcagcagtttctgcgcatcaatcaggtatctatacctcgccaagataagccagtggccaagaccgtcgtttgccggtttaatggcatccttcttgtcggtcttggcacggcgcaaattggcaccagcgctgcactgactgccgaagcatagaatccggaggcattcagcagtcaggcttccggtaaatgataattacccgtagactccattacaacacggggcttgcctggcagcccgcgaagcagtgatcgttcgctgtctgtatgttgccccattgtggctgaatcttgggaacgaatgaagcacgtctgacgggtgtgcttcacccgttgtagtagcgtccaaataggagaaaactggtaggagccatttcgatggaatcgctcctgtagaaaaggctaaaaacttcaagatataaccgttttctaagagataaaatcagaaacaacatccacgagatgcgggggagaaagctggcgggcagaacaggattcagctagttgatgggcggttccgtaatcgttggaaaaaggggcagtaactgctactgtaatccaacttcggcctattttttctttagcaagaatgccgtaagatctggaagataaagaatgtatcttaaatacctcatacttgtacatgaccagtcacctcagtatccccggattcttttgctgcatgggtatgaacaagagactcctgacgtttagatgcagttattggagtgccagaggcttccatcagatctttcagaaagctattcatatcaatttcgagaaagactgcaagtttgattgcgagaaaaaagccaggcatcttcttaccagattcaattttctgaatccatccatgggaggtcccaaccgcctctgcaagttgagcctgtgtcagttgaaattgcgtacgtttgagaaggacgtgctttgaaaaaattcgtcgtaaagttatttttgtcatgggaaaatccctccttatatagaggattttaaccatgaactataaaaatttggacggacctatagttcttgttggatagagcaacagaaaaacatcggattttgtcgcaaaacacataaaagcaagcccgcttctagcgagcttgcttgcagagatagatcacgtgttaaactgctctgcgaaatagcagtttcgtcacccaatgtcatccaattttcacgtattcttgcctgagcctccttgcaagatgtctctatctactccccctgtttcatggatgctgccggaatcagatatccctcttgcaatacaaccaagaaaatcatataataaatctataaattgtgcattttatataatttcaggatgtggttgcaggatggatacttacgcctatctggcccatctcacagaagacggccggacccagacaattctggaacatctcaaaggcaccgcgtctctgtgttccgctttcgcagctgcttttgacgcagaggcgcagggacagctggccggtatggctcacgacatcggaaaatactccgctgcctttcagcggcggctccatggcgggccgaaagtggatcacgcctctgccggggctttcgagtgtctgaaagctcaacagctggcggctgcttttgcgatctccggacaccacggcggcctccccgacggcggcggccggggagacgccgctggcgccggcaccttttgggggcgcatcaatcgggcgagtcaagggaggctggaggactatcatgcctggcagagtgaattctccctgcctcatgcaaatacccccgcatttgcgggaacaaggctggaggggatgtttttcacgcggatgctcttttcctgcctggtagatgcagactacacagatacgggcgcgtttatggacaacagcccgtatctgccagcatcgtcctcctctatggaggaattgtggcgccgcctggaaacctatgtctccggctggtttcccccaaaaggcgctctgaacatgcagcgatgtgtgattttggaacagtgcatgtcggcgggggcacagtatggaccaggcctcttcacgctgacagtgcccaccggcggaggaaaaaccgtggcatccctgtcctttgcgctggcgcaggccaaagcccgcaggatgaagcgaatcgtttatgtgatcccctacacatcgattatcgagcagactgcccaggcctttcgggagattttgggtgatgaaaatgttctggaatttcactccggtgtgcagttcgaccagcaggaggacgatgcatccagtccggaggccgttccgctgacccggtctgtggagacgtgggatgttcctgtaatcgtcaccacagcagtccaattctttgaatccctttatgcctgccagccttccaaatgccggaagctccacaacctggcccagagcgtcctgatctttgacgaggcccagatgctccccctcccctatctgcgaccctgtgtctgggcgattgcccagctggtccggcactacggcgcttccgctgttttgtgtaccgccactcagcccgctttggaccccatttttcaggaattcgctccggagatccccatccgggagatttgccccatggccgaagcgcactgggagtccttccgccgggtttccttccagcaggcaggaacgctgtcctggatggacctggccgcccgcctgcagcagcaggagcaggttctgtgcgtcgtcaacacccgccgggccgcgcgggaggtcttccaccaactgtccggtccaggcaatttccatctctccaccctgatgtaccccgcgcaccgcaggagaattctggatgagatccgccggcgcctgcgggatgggctgccctgccgggtggtctccacctctctcatcgaggccggtgtcgatgtggatttcccagccgtctatcgggagctgtccggtctggactccatcctccaggccgctgggcggtgcaaccgggagggcaagcgccctccggaggacagcatcgtcaccatctttcagggagaagatccacctccccgtctgtttgagacctccatcggcgccgggaagatcgtcctggatcactgccaggacgtcagttcccgagcggccatacacacctatttctccacgttgctggatttgaaaggcgcggaagctcaggatgcccaccacatcctgccgctgatggaatcggagttcttccccttccgcactgtggcggagcgattccacctgattgaaagccccaccacaaccgtgtaccttcctctggaggagggcgccggacttgtggaattgctgcggagcggtcaatacagccgcacactgtaccgccgcctggggcaatacggcgtgtcggtctatccgcagcatttagcggcattggagcaggcaggggcgctggagcatctggaggacggctccgtggtcctgcgggatattgggctgtatacacagactaccgggctgactctggagcccagcggtggaaatgccctgttcatcggataggccggagaatccattgaaatacctataccaaaatctgtctatggagcggtacgctgctccacccttccacaaacgaaagaaaggagtgcatgctgatgcccatctctttggaggtctgggggactacgccctcttcaccagaccggagatgaaggtggaacgggtcagctatgatgtcatgaccccttcggcagcccgggggctgatcgaggcaatttactggcatccggggctgcggtgggtgatcgactgcatccacgtgtgcgcgccgatccggttcaccaatctgcggcgcaatgaggtgaagtccactctctccgcccggtctgtccgcaccgtcatggaacgcgggaccggagagctgtatctctgtactgccaacgacatccagcagcgggcggcgctgctgctgcgggatgtgcactatgtcattgaggcccattttgatgtgacggacaaagccgctcccggggataacccgggcaagttccaggacattgtcaagcgccgcatccagcgggggcagttctatcatcagccctgcttcggctgccgggaatttcccgcccagttccgttggtgcgaggagccgccgccctgtccggaggagctgaaagggccaagggatctgggctggatgctgtatgacatggattacacgaacccggaggatatccgccccctgttcttccgggcgtccctggaagacggcgtcctgcgggtccctgggcggaacagcagggaggtgcggggatgatcttacaggcgctgaccgactactaccgggtactggaacaggccgggaagatcgacgcccccggctgggcgccggtgaaggtgtcctatgcgctgctgctctcggaaaacggcacgctggagcaggtgcttgacattcagacggaacagccgcggggaaagaagatggtttccgcgccgcagatcctctccctccccgcgcctgtgaaacgaacggtgggagtggccgccaacttcctctgcgacaacgccggttatctgctggggatcgacagcaagggcaagccccagcgaacgcgggagtgctttgaagccagcagatctctacacgagcggctgctggcgggtgtagactcccccgccgcccgggcggtcaccgctttcttccgctcttgggaccccgagacagcccgggaacaccccgctctggcggagcatctggaggacatcctctccggcggcaacctgatcttccgcaccctggacggctatgtccacagggacccctccgtccggagggcctgggacgcatcctatcagaccaagggggatggtcctcagggaatctgtttggtcaccgggcagccgggaccggtggaaagcgtccaccccgccatcaaaaatgtggcgggtgcccagtccagcggagcggccctggtgtccttcaacgccccggccttctgctcctacggaaaggagcagaacctcaacgctcccaccggcaagtatgcggcatttgcatatacctctgcattgaacgcgctcctggccgaccgggaacacgtctttcgcgtgggcgatgctaccgtcgtctgctgggccagaagcggagagcggggatatcaggacgtctttcagacgtttttctccgatttctatgacgaaacggacctgaaagggctggttggcgccttgtgtcagggcaatccggtggtctacgatgagacaaaactggaccccagcatggacttttacatcctgggcctgtctcccaattccgcccgcctgtcggtgcggtttttcctccacaatacgttcggcgggtttctgcggaatgtccaggcccattatgaccggctggagatcgtccgcccggcctacgacaaatttgagacgctgcccctctggaagctgctcagtgagaccgtcaaccaaaatgccagggacaaatcccctgctcccgacctggccggtgaagtgctgcgggcagtcctgaccaatacccggtatcccgccacgctgctgaacggcgcggcccttcggatccgggcggagcgggaggtcactcgggggcgggcagccatcgtaaaagcctactaccaaaagcttgcagaaactaccaaacacgaaaatccagacataccagaggaggtcttgcaagtgtccctgaatccggatgcatcgaacgtgccctatacgctgggccggctcttttccctgttggaagccattcaggcctctgcaaatcccggcatcaacgccaccatcaaggacaagtatttcaactccgccgccgctacgccggccgtgatttttcccgttctcatcaatctggcgcagaagcatctgaaaaagctgcgcggctccaacgcagggctggtggtcttctatgaaaaacagctgacagagctttgcagccgcattgggaaagcgtatcccgcccacatgaatctgccccagcagggctcgttccagctgggctactactgccagacccaggcccgctatcagaaaaaggaggaagcgaaagatgtctgaacccatcaagaaccgctatgaatttgtcattctctttgacgtggaaaatggcaaccccaatggagacccggatgcggggaatatgccccgggtagatcccgaaaccggcctgggccttgtcacggacgtgtgcctgaagagaaaaatccgcaattatgtagagacggtcaaggaagacgctgccggctaccgcatctatgtgaaggacggggtccctctcaaccggagcgatgccgaggcctacaaggcgctggatgtcgatgaaaaaaccgctaaggagaagaaaaaagccgatccggaactggaccgaaaaatccgggactggatgtgcgccaacttctacgacatccgcgccttcggcgcggtgatgaccacgtttatgaaggccgccctgaactgcgggcaggtccgcggcccggtgcagctgggctttgcccgcagcgtggagcccgttatcccccaggagatcaccattacacgggtggccatcactaccgaggcggacgcggagaaaaaggggacggagatgggccgcaagtacatcgtcccctatggactgtaccggtgcgagggctatatctccgccaatctggccagcaagaccaccggtttctccgaggaggacctgtccctgctgtgggaggccatcctcaacatgttcgagaacgatcactccgccgcccgcggcaagatggcagtccgggagctgatcgtcttcaggcacgacagcgagctgggctgcgcccccgcctggaagctgttcgacacggtaaagatcgcccgaaaggacccggcggacgcctcccccgcccgctcctttggagactacactgtctcagtggacgagtccgcgctgcccgccggcatcacctgtacccgcatggggtgattgatttttctgaggacctcctccccctctccggtctgcagcacttcgcgttctgccggcggcagtgggcactgatccatctggagcagcaatggcaggagaacctgcggactgtggagggcggccttctccatcgcagagcccacgacgaggcggcccgggagcggcggggcgataccctgatcctccggggattgcaggtggtctcccatcaactggggctttccggccagtgcgacgtggtggaattccacgccacccccaaaggcgtaccgcttcagggggaggaggggctttggcagccgtatcccgtggagtataagcggggaaagcccaaatcccatcaggcggatgaactgcagctgtgcgcccaggccatgtgcctggaggagatgctctgctgctctattccagaaggcgctctgttctatggggagccacgccgccgcacggtggtgctcttcaccccggagctacgggagacggtgcgcagggactccgacgaaatgcaccagctgtaccatcgaggccatacgcccaaggccaagccctccaaatcctgcaacgcctgctctctcaaggagctgtgcctgccccagctggtccggcgggagagcgtccagacgtatctgcgccgcgccatggaggaatcgccatgagacatcttctgaatacgctgtttgtcaacagtgaggacatctacctgtctctggacggggagaatgtggtggccagccgcggcaagcaggagatggctcgctatcccctccacattctctccggtatcgtctccttctcctacgccggcgcctctccggcgctgatgggggcctgtgtccagagggatgtgtctctggcgttctgcacgccccggggacggtttctcgcccgggtatccggggaatcctccgggaatgtgctgctgcagcggacacagtaccggacagcagatgatcccggcccctgctgccggatcgcccgcaacatgatctttggaaaggtgcacaacacccggtggagcgttgagcgtacccggcgggaccacggcctccggatagatgaaagcgcgttttccaacgcctccgcccagctgcgggcgctgctgccccagatcgccgccgaaacctccctggagcagctgcggggcctggagggcgccggggccacgatctacttcagcgtgtttgaccagatgatcttaggggagaaaccgctgtttgccttttcgaaccgaaaccgccggccgccgctggacccggtcaacgccctgctgtccttcgcatacagcctgctgacgcacgactgtgcctccgctctggagagcgtggggctggacgcctatgtgggatttctccaccgggaccgccccgggcgaacctcttttgccctggacttgatggaggaactgcgtccctgccttgcggaccgcttcgtcctgactctaatcaacaatcgtgtcgtgcacagggacgacttccagttccgggaaaatggggcggtctatctgacggactccggccgcaaggtctttttgacccactggcaggagcggaaaaaagctgaactgacgcacccctatctgggagagaagatcccctggggcctggtcccctatgtacaggcgctgctgttggcccggactctgcgggacgacctggaggaatacccgccctttttgtggaagtgaggcgtccgaatgctggtactgattacctatgatgtgaacacggaggaccccgccggccgcaaacgcctgcggcagatcgccaggcagtgcgtcaactacggccagcgggtccagaactccgtctttgagtgtatgctggacactgcccagtgcaaggtgctgcaggccaaactgctctccatcatggacccggaaagagatagtctgcggttttactatctgggaaagcgctatgaaaacaagatcgagcacttcggcaatcagcgcagctaccaaccggaggcccctctgatcctctgagtgcgaaggggaagcgaacatcgttttcccggcaggttcgcactcaaatatcatcaaatggacaggagatttccgtaaatttaagcgtgcgaactgtgacacagacacggctcctggccattccagtttacgaaattgcacatttgtcacaaaacatacctgtgcctttgtgctgtttcgctgtcgctcccctcacggggagcgtggattgaaatacccttaatccggatccgttgtatccctggcttggtcgctcccctcacggggagcgtggattgaaattcctcccacagcaccgccgtcccctccagcatgtgtcgctctccgcgaggggagcgtggattgaaataaagcggacggccacaccgtccacgactttgacgtcgctctccgcgaggggagcgtggattgaaatatcctccaccacctcatagcccatcaggcgggcggtcgctctccgcgaggggagcgtggattgaaatagctccgtctccagacggtgcaccagagcggagagtcgctccccttacggggagcgtggattgaaatcccggcggctccggaaggggcatccaccacaagagtcgctccccttacggggagcgtggattgaaattttaccgggaactcgctttgatggcgcaggacccgtcgctccccttacggggagcgtggattgaaatttcacggcggcgtcaatggcggcctgctgctcttgtcgctccccttacggggagcgtggattgaaatccgagccggacgaagcgttggatgtgaggtgatcgtcgctcaccgtgaggggagcgcggatggaaattcaatgtccgcagacaggatctgcttggcgctgagaaaatccgcatgattctcatgcagagggagcacaaggtcaacacaagatttgtggctgatatctatgcgtgagatggggttgatctgtgtccgaagtacttcaaaatcggagggactatgcttctgaatcagagttcaagaacaggatcgactcatatattgaattccgcaatacaacatggccttatcgcacattaaaaaattggactccatgccagatggaggaagactaccaaacgtagtggtgccaatcctaagaggttggcatataggggttcagatttcggaaatcttctgttttgtaaatcgatttcaagttttttgtgttttcatgtcccatttctattgcagatatgaaaatggctgaaaaccttgctgtgtcaaggttttcagccataaaacacccccacctaatccgtcagtctcatacaaactattcagattaggcggggggcgttcaaatcattgaagtgtagtagcccacaaaatctatatcccatctatttgttttcatctgcactagcttttcttatcttaactagatcgcttaatcaacagctgcctagctgaaaggatgctatataatgtcttctcgtagcaaaaatccgagaggagaccctctgtttacaagaaagtccaagacatttaaaaccttgtgcttacgcagggcatccgatttgaagaggtacagccgcttttgaacataacggtacatatactcttccatatagtagatagtgtttgtgggaagagcggtttgacgcagctgggggttgttggatataatgtcgctgagccattccacgccgtcttcaaagaacacttgggaaccgatgctgttcaatacccgaccgacagagtacaaaattgccggatgtgctcccgtcctatttactgccgttttataaaagaccgcacagtcctcccggagggagtgccaggttgtgatgccttctctccattcaggtcctgccaaaagatactccgtcaggacatttcctattccaaaactgatggcccgatcctcatccatctgttgctcgaattcgggggcccgttcgaaggcagagaagatgtagtttttcagcaaatcccaaaatccccaaaaggcgctatacctaggtttaatatcttcggcctggataacatcccgcaaaaagcgggtgaattccttgccgtatttcacgtgcttcaccaaatggtccagaaagatgctctgctgctccgcagataggcccagaacatagtcgccgagccactgtgtatatgcgtactctccttcgtagtcctgatagccgtctctgtccgtgtcctcaggtccgagcaatgtaccccagacccggtccccgatttttaatacgaaaacgaaggagccttctacattaccggacggaatcatccgctgcagggcaatcagttggtgaacctcaaggccgctcaaagggatgtcttctaaatcggagacctcctcttgaaacagcgcctggatttcttgactgtgctgctcaaaaaaggtccttgtagaaatgccgttgtagcaaaggacttgggagaaatatcggggtgcgagcaccgcataggtatgcattagctttcgggccacattgggggcggagggccaaaggatggaggccacactgttcagcgcttcattctgtttgccgttatacatcacaagggccagcagcatgaaaagtggagaagaccaatcggcgatgaagtcgtcactggaaaccagacttgccactgcggagataactccattcaactcatagggacctagatggcaatctcgattcaaaaagttcagacaggtcgccagaagtacctcggtgcaaaaggcaagcattgtctcatttatagccgtccgtcgctcccgtaaaaggactgcacaggcatttacggcactggaaatgtcgtgggagtccgcttctccctcctccagaatctgatagatctcatttaccactggctcgataccgccctcaaactgtgggtactgttgggcagcttcctgattgcctcgaagttttgcatctgcccaaagcattagcggtacatgccgcataaagtcctcataattgcgttgggcctgttcgctgagggctgtgagattttccggcatatctggcaccacagagatcatcactctgtcctgggacaccttctggctactaatctgacgccttcgaaggtcgctccgatagtacgcaaactgatatacctcctcccaggaatcgatgctctgggttgcctcgtcaaatgcggcatacagctgtgtctttctctcttccagctcattctcagacagaatgcctttttcaatctggtagtccaccaaaacttgttcaaattgcttttttcggaagggtagtgcattggtctccatccgctcatggtcgaaccagcgatgagatgccagcgttcctttcagaaaatcggcactgtgctccgcctgcagtcgggcgatgtcgaagacaaagacctccttggtcttcaacagaatacagctgatgggaaagagcttatctggataggcaatcaccacactcagtaccacggcagtaatggctgcgcttgcggatttcctcagcagatactcacagaactggcatatggttttctcctcggtaaactcggccaaatccagtagccatttttccagtgccatcaacacgctctccaacaacttgggtgctacatgagtacctcggtacatcttccacagtctgtcgctgcacacctgtcgctgtaccgtgccgtcagtgaaatggatttcaatctgagaacattcagaatactctgttgccaatttggaagaactgtagcagtttgtggcgtagttcatgatccgcaggatcgtgttcaacgcccggattggtgcctcctgtaataggaaaaacagcggagtttgaagggcgctttccgccttgtatttcatatccaagctgtgggacaggccgaaatagtactccatgctgtcatgagaatagtcattatgttctcgttgagaagagtcgcaccaataacgctccgcaagactgagtacctgctccggaattgcctggcaaactcttccgcattcataaacattggacaggctcttttgcaggagtaaatagttttccttgtaactatcatccgtctgtgtatctgtaaaggattggaagatgtcggtcagttcctgcttcagttccattgcggcagccaaaatcacatcggtaagggtgataaatcgcgagtctcgccgaagggtatagggataccgctcccttttccatatctcacttttcaaatagagggcaatcctccccgccagtcccgttgtctctcctgtttcatatttcgctgtccatgttttcaatgtattagtgacgatgtccagattttgggctgtccaaggaatcaggccacggttattataaatatattgaaagaccgtaaaccaagcccgtcctacagggcaggtgaagcgatacttgttccctgttggcgtggacagtttctttaacagttcccggtcgatgtcacggcaggcggtgttcagtagaaagaccatgcgggtgaacaaagagtatcgttcctgactcagaatggggtcgattgcccggaaacagtccacctgatcagactgcatcagtgcgatcagcgtctcatccttccaagcctgatccagtccgctttggagcatagagatcaaaaaatctgcatagcgacctccaccgctagcaaaaacggattccagccagatgcgatacagcttcctggctcgtagagataggccgaacccctctagaaccttctcggcctctattccctcctggtaccgctgggtcaaaatgtgttttataatcagctcctcatacacatcgtgactcatcatccaccgacgtggagagttgtcgtaaacggcgataattccgctatcctccagcgcggtcagcgccatatagtcatcgttggcactgcttatgtaaatggtggatccccgttgcagcatagagaacacgatgtgcgttaccatctcctctcgtcggacggggaggttttctgcgcgacggtggctgtcacagatgacctccttccagacctgctgcagaaacagctcctcagaggataccaaatccaagccagccggatctagctttaagtacagctttaaatagaagaaatccttcaggaggcttcgaagattctggttttggggaagtgggaagtgatactgctctgagatcgcttctagcacctcatcagctatgctctccacccgaaactcgtcataagcgatgtctttgaggagaatattgcaaaagctgtccttgtatacggtacggatggtgaagatcatcttccagccgtggtcaatgaatttatggacaagggcagcaaatacctgtgggctattaagtgcggagaacttctcagcggattcaattacacagacctttcgcttctcttgactgtagagggtaaataagtcttccagttggtagtttccatacttgcgtaaaaacagactttcttcctccacatccaagtcggtggaagagaacaagaagcaggcaaactcatcgccctgctcctgccgccgagaaatgagatccttcactacgccagatttacccgtccctgcgtcaccatatatgatacagacagctttttccgactcccatagtacatcgagcttctgcatatcataatagattttgatccgctcaccctggcacggaatctccgactgaatattggaacggatggagtcactccggttttggatctgctcaacccactgggaaagacccggcatagggttaaaatataaatctcttactgtgggtagtgccaaaagtatctgctcgatatggcttggcccccgccattcaacagtgatgccaaggctttcgccgtgtgtttcgatattctcttgatatatgggcttctgggtatgagggcgcttgctgacagacatttccttattaatataaaaaataatccggctgattcctgcatatttctgctttgcatccgcaatagcatttttgaaatccacttctttagatgaaatccgagtggaagcatcatagtatttcgcttgaaatccggtcaaaaggccatccggagccatcacgggctgtgtttcgatatatggttgattgaagtaccggaaaataccgtgcgaaagccccatctcgtggcagaacagcgtggtgacaaggccctcaaaggcagccctgggattctgagaaaacttggactcaaaaaccttccagtcaacggggatattcgtcatgtatagccctccctgcggtgccgaatataacgttattacaatttcattatggcataattgtggtagatttacaatgctactctcatagagacatgaatcagatttctgttaatggtatatgcggtgtagtacaattcataatccaaaatagggtagttcctttcatgtgatatgctaattcatatcacatgaaaggagcaaacaccatgacctacacagatcaagagaaaaccgctatcatcacacagtacagacagggcaggccaatccagcaattatgtacagaatgcggcgtctgcgcacggacgatctaccgctgggcgaagatatactgcccagtggttccggacgaaaaacgcacctataccgtcaaagagtatgatgcacttcttcgcagagttgccaaattagaaaacatggtcgctattttgcaaactgtcggctgcacggtccatgctccattgaaggagcggttaggagaactggagttgttatacggccaatacgacgtacacactctttgtgaagctatgaatgtctcccgcggaaccttctataaccatattctccgaaataagcggagcaatgcttggttccaaaaacgcagagaggaatattgcggattgatccgtgaagtatttgatgagtatcgtcaggtgctgggtgctgaaaagatccgcactattcttgttcaacgaggtcatcaggttagcccagaatatgtggcaaagttgatgaaggagatggggctgaccagcatccgcagtactgcgaagcaggattacatgaaacttcatgagccagaaaagaaacggaatgtcctgcgtcaacagttccaggcggacaggctcaatcaaatctgggtcagtgatgttacctgctttaaactgggggagctttatctctatacctgcgtaattctagacctgttttcacgcagggttgttgcctataaagtgtccaggaagaatagcacccagttgattacctccacatttaaggacgcatgggagcagagagctcccgataccggcctcatttttcacagtgaccgtggggctcaatatacctcacatcggttccgacaactgcttcatgagcgcgcagtggtgcaatctttctccaattcgaggaaacctcatggcaacgctgttgcggagtctttcttcgccaccctaaagaaggaagatctgtatcggaaggattacacctcagaggcggctttcaagcgtggccttgcctcctatatcgagttttacagcacccagcgcccacatcgtaccttgaaaaatctgacgccatgccaggttgaagatgcgttcatgagtgacaaatcatgaatccgtatcccagtgacacagctggggggcagattccatcgattgcgcgttttgcgtcttgatttcgccctgtttgcatttgtttggtgacatagtgccctctataataggaacgccagaaaccattgtggcacaatggtttctggcataaaatgaccctacctattctgaacattgacatctttttgttcagatcaggtagggtcattcaccggatttaccccttcatcagacggttctatcgcagagaataactcagaaattgcgccgcataaacaaagaaataagcgcgatgacaaagaaacagcaggctgacttggatgatagccagcctgctgaacgaagacgtttattcgatgttttgcctttcggcagcaatacgtgttcttttgcctgagaatgcaatgccgatttttataattgacgtaacattcattgcctgcaaatcaacgctgtatgcacggtcgttaatctgttgcaaggcaacattagcaaggtcttcaagctgtgcttcagagcggccttttccagcctttaattcaatcagaataccaggaagccgcttattcaaaggaagcatctgaatatcaaatcgtccatcaccagcttcgcgattggaggtaatgcgatagctgttgtccatcacagcgcacatacccaatatcagaccatggtaaaatgtttcgtcggcagcatcgtggaaacttattgtttggagcagaaacttctccaaagttttttgcagtgagtcgctatctaccttgtagatagcttcctgaatagcaatagcaacggaacgaggaataatattctcaagctgagagaggacctccttgctgtagacgaaagaaatctctttgttgggcagagctacttcgcacatataatcctcgccgtaagactggtcgcagctcacagccttcaaataacctgccaccagcaggaagctgtaaacagaggacggatcattctgaatctgcggataaatgacgccagtgtcaatgtgcgtaacgaaggattcgcccttcatcaacagctccagacgctccataatatccggcgttgcagaagccagcacctcgcggatgatgtcattgcttccggtagactgccagaacgctttgggacggcagttattattgaagtatccaataacagaccagggattaaaaatctcggtattgccgaaaagataaccatcataccaatcgcagagctcctgatatttatcagaagcatgatagtagtccgccatctcatgtacttcgcttgaagtgaagccgaaatattcactgtagcgctcgtctaaaatcgagttgatcttcaggttgttcaggccgctgaagatactttccttggcaacacgcaggatgccggtcaggaaaccatagctcagatgcggattgtccttcagaccaccggagaacaggtttcgcatgaacccgatgatcgtgtcgtagaagccgctcacatggccctgctgaatgggagtatcatattcgtcaatgatgacgataggtgcgacattgtggtgcttatggaggagcagcgtcagtgtccgcagggacatttgatattccacttcgtcagcagcttctgttgcaagaagggagtattcctctttttcgtaatcactaagtgcggagctggatgccaactcgtcgtgacggcggaattcctgtgcgatcagcttttggagcgtctgataggtttcttcccaagaggtgtatttaacatccttaaaggacaggaagatcacagggtactttctatgatgggcaagataggatcctccgcaggaccagattttcttatctctgaagtaaacggaagtgtcctcggtcgtcttttcgaagaaagtgcggagcatatccatgttaagcgtcttgccaaagcgtctggggcgggtaaacagagatactttggggcgctcgtccagaaactctttgatcattaaggtcttgtctacatagtagtagcttttgcaggcgtcccggtaatcagatacgccaatgggcaacggcttgcgcgcagatgatactgcgggctccaccgcactccgatgaccacgcttatccatcggcttttgagcgctgtccgggataaaccactgcctgccctccttatacgcgccggaaatgcgtccggctttgcaaagtgcattgacccgccgttcggtaatcccccaagcggcagccgcttctttgatcgtcatattggaacacctccattgcagttcgtcaagaatattataaccacgcttccgaataaaatcaactatattattccgaataatgtcggtgttattcggaacggtagttttcctgcaaatattccgttctttccggtagctatttcctgctttctgtgatattgttcgtttgccaaaaggaggcgacgatatgcagaaagaaaataccatgacagtcgggcggtggtgcggccggtggttcatcaccaaccgccataaatggaacggcaacaccgagggcgggtaccgcaatctgatttacagccacatcatccccggcatcggaagtgtggcgctctctgacctgacagagcagaccatcaccgatttctatgagacgctacggagtcagggactcagcgccagaagcgtctggtgcgtccacctgcttctgcggcggtgcatggacgaagcggcacaggaccagcttattccctacaacccggtgcggctctgccaggagcccaaggcagaggaatacaaaacagcccctttgcgattggggcagctccagcgttacctgaacgcagcggagcagctcggcgtacttcccgtcatctatacaggactatcaagcggcctgcggcaatgtgaactgatcaccttgtcgtgggccgattttcatatccgctgcaggtacatcctcaaaggccaacggttgctgacgctcaatgagaaagcggcgtatctcctgacgcggatatcagaaaccagttcatcatatgtgttccagaaccctaagaccggagtaccctacaagctccacgagttctactacttacacaagaagatcctgaaacaggccaggctcccgtgggtggcctttcgggatctgcagcgccagtgcatggaggtgggaatatgacacttcaggaatacatcagcttctggcaggaaacctatgacaagcatcagagcaggccgactacctatgcggcacacaactatgtattcaagaaccatattctccccggtttgggtgatataccgctctctgaattgacatcggagatggttggagaatttctggaggaacggaagcgcttcggcaatcatcgaaccggcagttctggcttgggagaagaaaccatgcggcacatccaccgcctgcttcagcaatgcttggatcaagccatacgggacggtctcctaacagagaatcccgccaaggcattccgctaccgcaagtccacaacggtgaaagcgaatatcatgacgcctctggaaacggaggactatctggacgctgccgagcggctgggctacctgcccatgttcatgctggcgctgacgacaggcctacgccaaggcgagctaatcgccctgaaatggagcgaccttgatatcgaaaatcggacgctgaccatcgcagaaaaccgtgccgtggtacggcgagagctggtggagtacggcagtcagacaaggacgatagcactgacaccagaggtaatcgacctcctaatcagggaacacgacaagcacccaagcagtccgctcatgtttatgcacccggccacgctgaaaccttactcgccgcagatggtgcgccggatgcacgatgagatcataaaggaagcgggcatcgaccatatcaggtatgtggatctccgccatacctgcgccatcctcgctctgaagaacggcatggataccaaggaactggcgcagatgcttggacactaccgccccacgatcaccaggcagaactatgaaccctatctgccccacaaggtacaaaaggacgaagatataccaaatgaggccacccagagcgaactgcaacaggcggcaaatattctggataatcttctgaagttctaatagctattccgcaaaaggtgtggtatatgtctgtgtcacaaggaggcgaagcccatgaaatacaagctgatcaaagaactatatgactgcttctacactccgccggagctttcggtaccccggcaagaaatagaggactgccacaaagctttgattgaggtgctggagaaacccgaacgcaggctggtactccagatcatcgatgccaaggaccgcattgccgaagacacttccatcgacagcttcatctccggatttgagctggcgtggcagctctctatggaactgaacaactataaaaacgagcgcttggtctcctgccgaactgggagactgggcgctcgtttcacacgcaaagaggaggagccaaaatgaaaaagcgtatcatcatcaccgtagcatttaccgcctgtatggccctgtgtgccgccgtgtggccgcaggccgaaacggtcggggaaacacccgcaccgcaccaaacacctgccgtaagcgccccagaagcgaccgttgtggaaatcaaaacagaagccgaaacggcactttcgtcagagaaagaaaaggctgtgattccgcagccggaacagacccaggaggccgtcgcagaaccgaagtcagcacctgcagaaacacccgcagtccagctcgccccggagccagtacctgtcccggaagcgtcttatggtctcaccccggagcgagctgcagaaccgcccgtagctaaaacaaccattgaacctccgtctggcgacatggtctatgtccccggctttggctggatacaaagcaaaggccccaaccatgtcgagtatgccgaggatatgtacgagaacggcaacaaaatcggcatcatgggatgacctcaaaaactgcgccgcataaacaatgaaaaagccaccttgaaaatcggcgataaaaaatcggtgataaatgtcggcgacaaacgtaataaaccaatagtccgaacctatggcaatcaatagatgtagaatttttgctgaaaagtatacgggcacacaatgatatagcaagcatcaacgaatagcggaaataatacgaaatatgttcaaaatggttgaaaaagacgtaaacactcagtataatatagaaatgaatctgcggaaacatacgaagacgaggtgtgccaaatatgtctaattcaatcaacgaaaactatattagtatcgaagatgcagcgttgtttcttaatattaaaccagtcactttacgcaaatggataaaagataaaaatgtgcccgctcacaaaatcggtaagcagtggaagttcaaacgttctgagctggaagaatgggtaaaaagcggaaagagcgctatggagtaatttcgctgatttcgtaggaacacttagggaaggaatatatataatgtcggttaatataaaatgtgttgacttgttttgcggctgtggcggtatgtcacttggctttcagaaagctggattcaacatcgtcgcaggtattgataactggaaatccgcgattcgagtatatggaatgaatttcaatcatccgattatagagcaagacctattggatgtagatgaggcagttaaaataattgcggcatatgctcccgatttaattattggagggcctccgtgtcaggatttttcaacagcaggatatcaagacgaaagccgtggcagggctattttatcagtctgctattcacaaattgtcagcaaggtcaagccaaaatattttgtcatggaaaatgtcgcaacaattcgcaatacgacatctttccgtaatgctattgctaatttccatacagcaggctatggattaacacaaatggttctggatgctgcgtattgtggtgtaccgcaaacgcgaaaaaggatgtttgttgtaggaatgctcgatgctccagatagcttcttagatgaggagttgcgccgtaatttatctcagacacctatgagtattcatgattatcttggtgattcgcttgggataggctattatttccgagtcccgacaaattacagccgaaggggcgtgttcagcatttatgagccgtctatgacaatccgtggggttgatcgtccaattccgaaaggctataaagggcatcctaatgatccggtcccagtagaacaggtgcgttgcctgaccccgaaggaaagaagctacattcaaacatttccggagagcttccagtttgttggtggaaaatctgatgtcaattcaatgataggaaacgctgtcccggtcaatttagcgaagtatgttggctcggcccttatgaggtatataatgtctaacgaaagtagagataacaatgagggtaattgacttatttgcgggttgcggcggtatgtccttaggatttgaaaatgcaggatttgatattatcgcagcatttgacaattgggatgccgcaataaaaatatacgaaagtaacttttcccaccctatttacaaaaaggatttgagtaaagacgatatcatacagcagctttctgatatgcgccccgatgtaattatgggtggtcccccatgtcaggattattctatagcaggaaagcgagaactgggtaatcgtgcaaatcttacgataaggtttggagaaatcgtaatcgcagtaaaacctatgtgggtagtctttgaaaatgtttataatattgaacgcttttcgaccgtcaccacgctgaaacagatgttggtagatgctgggtatggtattaccacacgagttttagatgcaagccgctgcggcgtgccacaaaagcgtcataggttctttctaatcggtaagcttggcgaaaaaaatggctttcttgatgagacgcttgtgtccaacctgtcatgcaagcaaatgactgtacgagactaccttggtgatgccctaaacacagaattttactatatgcatccgagaagctaccatcgtcgggccgttttttcagtagatgaaccagctgcaacgattcgtggcattaacagaccgattccagataattacaaacgccatcatgctgataaggctgatatatgcgatggtgttcgtgccttaacgacacgcgagcgtggctatattcaaactttcccggatacttttgatttccctggtgcgaaaacagatgtcgaacttgcaataggcaatgctgttccaccagctttggccaagtatgtggcgaattgtataaagcagtactgtactgaataggaacagaaagaggtgtgtttatgtcgtatttcaacgaaatatctgattatgcaacatattctgggcatgaagcagattttcatttctcctataatgcaaacagtggcggcggtcaggcttttttaggtggtcggttttacgatgaaaatggtcacttgacttctccggaaactttaaacgggcgaatcgttgcgtttaaatatctcttccgaaccgagaatggtgaggaagtgtctgttgttattgatgatgaaaaagcaaaatatgaagttaaaccacgaggaaacggctcaacatcaatgaaacttggcatcgggaccgatcgcgtgtccccgagtaaagtggtgtcagcgtttatgatgttgcctcctacctgcggcgtgaaaacgccaagcaatttgcaattatccatattaagtgcaaataattattggcttcagtccatgtggcttgaatgtagcacagaaaccgaaacaccgactgaagctattttcatcgtgaaagattgcgtttttggcggtggcgtgagcaaggaaactacggatcgggcaggccgctattttaaattagacattgaaaagcggattgcggatattattgctttatctcacaaaacagatgcttttcgcgaagaaatcgcaatggcgattaagctctttgctgatatttatcttgggcatcgcgcattcaattatgaagagtgcaatcaggcaacgaaatcccttatggaattgcttgcgcaggattttccagatgtctactcaggtatcacagatccgttgtctgcaatgcatgacattgtgataaaacagagtcatgaaaatactgtcgatgcagaggacacctctgttgataacgaagccgcctttaaggattggctggcacgtctcccaaaagcaaacggtgagctatattctgaaaataccagaaaccagtatatcagtgcacttaaatctgttgcaaaccagtttgcagatactatcggcccttttacctctgtttttgagattgctgatgtggagacatttaagaaagttgcttctgccatcaaaggtcatgctacatatgaagagttcaaccgtagccgtggcaatggctccttatccgcaggcctcgatttgtatcgtcgttttttggaagaacggaatccaaatgatggggtagaatatctctctcctgcgtggttcagacttgccgctgaaaagtatgtccaagtggatacggagtcaaatgctctgtatcagcagtttcaaagtctgtatgccccggaaaaactacgtaccctctctgacgatgacctgttggggtatatttttctcggcgtaaatgatcgcagtctgtgcaatgcattagagttcgatgcccaatatacacagtttggcagcatcgctggtggcaccgcatacaaatacaatctgttctacagtagaaatgaagaaacctggaagacctccttcggtgaaggtgggcagcgttccgtgtctcaagaagaggctcttgaaattggcaagcaaatccgtgatgctctggtggccggtgcggatgttatcgcaaaccatgaaacacttgcgacggtcaacgactacaatgctctactgaatgagttgaacgctgtcattccgcagtatatcaccaaaatgtggttcttgaagtattaccacatgatgttccctcatatcctgcccaacttttacaatgaagcatggcagaaacacattctctgcaatttgaacattgttccttctgatgcgcaatttatccgtatgggacaaatcaatgcttttgtaaatgagtgtggtatctcaaacatcgtcttttcaaaaatcatttttgatagtataggatctccaaaaacattttatcgaattggaacaggcgacaatggtatctattttggcgagtggcgacagaataactacattgccatcggttggaacgaattaggcgacctctctgctgcataccaagaggatgctgatagcaaagcaataatcaccgatgcgttaaagagccagtggaattatgataacaggctggcctcgcgtaaatatggcgagattaatagtttctattcggctgcagccgataccacatacgcagttgcaatggcaggacagaagattcttgctatcggacttgtgactggcggttacttctttgatgaagaaaaagaatacggtcactgccgacctgttcgctggctcaaagtttttgaggaaggaaaaacacttcctttcgagggtgaaggtaagctgaccactttctatgaactgaaaaacagcgaaaatatatgctacttgtattctcttctgcatggtcgtgatgaaaccgctgtttctgtcacagaagaagaaaatgttgtagcgcaaatccgcccgatcagcttcgctacaggtctgagcagtgaccaaccccgtaaccgtattctctttggtgcccctggtactggtaagagttttacgctgaatcacgaaaaggatctgctgcttgcagatggtggtgagtacgagcgcgtgaccttccacccagattactcctacgctaattttgtcggtacatacaagccggtgccctgcaaggacagcgatggcaaggacgccattacttattcctatgtacccggtccgttcatgcgcacctatgtgaaagcccttcagaacagcagaactgatgcacccaagcctttcctgcttgtaatcgaggaaatcaatcgtgccaatgttgctgccgtgttcggtgacgtattccagttgcttgaccgtggtgatgacgaggttagtgaatatccgatccaggcatccgaggacatcaaaaagtatctggcagaagaactcggcggcaaccccgacgattacgctgaaattcgcatcccagacaatatgttcatctgggctaccatgaacagtgctgaccagggcgtattcccgatggataccgcttttaagcgcagatgggacttcacctatttgggcatcgatgacagtgaagccggaattgttggcaaaaaggttgtcctcggtcaaggcgattatcgccgtgttgtggagtggaatgctctccgcaaagccatcaacaatgagctgctcacttataaggtgaacgaggataaactgatgggcccgtatttcatctccaagaaaaatctgccggagggtgaaatgattgaccctgccgtctttacccgtatatttaagaacaaggtcattatgtacctgttcaatgatgccgcaaagcagaagcgcattactctgttcggtggctgcgatgagaaggcaaagaaccagtattccaagatttgcagagaatttgacaccaagggtgtttacattttctgcgaaggaatcagtagccagtttattgataatgtcccagaggatgatggagaatgatttcagtatttttacgagaacaaaaacgctatacccaggaagacctggttaaagagtttcgttgctccgaggaaaagactgtccgcattctgaaacgactgaaagaatatggcgttctgaaggccgtaaaagcaaatgacacacagaaggaccttaccgatttggtggacgaagacatcgaaatcgctgatgttgaggtcggtgaaaacgaatatctgtatgtgttcacttttgtgggtgttattacaattgagggtcgtgtgttgaaatgctatccgaaatatctgctcgatgccacggcccccaaagcagaactgaaacaagtgctgaaggttctggaaaagtacaattccaaggaacagatcattcgtatgtacaacgatacgagcgacagcagtgcatttaatatgttggctgttatgctgttcctcctccaggattatttcgagtatggtgcctacaccaacacgcaggacatcattgaatccaacgggtccggtgacattctttgggataagaccatcaacgaaactttcactctcttaagcaacaatcggccgtattacccggaattgctgaccatgaagcgtgtgaatgacgatttcgatttcttcaagcgtctacatgagtgtatcctcactcattgcacggaggaattgagagatgccgatctgttggatctgttcgatattatgggtgtcgatatttccgatgagcatatcgaggactttggtgacaaggagtatgtcctggagcgcattgtcaaagaacttaatgtccagttcaatacccggaaacagcttctgctgaaaacgctatatgcctatatagccaacagcagcgcactggacgatttggactgtttcagtatgttcggcacaaacagttttaacctggtgtgggaaaaagtctgtgcggaagtgatggacaaccaattgcagaaacctatcggtggactgcgattgcctatgccgttggccgagcaataccgtgatatgcggcataagaaactcattgacttgattgataaaccgcagtggtctgggaatgctccaaacggtgagttgtttataaagcaggccgaggatacgctcatcccagatcttatttccatcgttaatgccgatgggaactatcagtttattatttttgatgccaaatactataacatccaattggagcataacaaaaagttgcgtggtcagcccggtattgagtccatcaccaagcagtatttgtaccagttggcctatcagccgtttgtggaagcacatcagattggcacagtgcggaactgcttcctcatgccgacctcttctgctgaaatagtcgaaaaaggaactgtgtcccttgatatgttgagcaagttggggctacaggatattcagatacgccttcttcccgcgcaaacaatgtatcgccattatattgaaaacacaaagatggatatcagaacacttaatctataaaggagctcggcaactttacagttttgcaaacaatgcaaaatatttacaaactcctgatagatagttttggaatgaagtaggtggtggtgtaatgccttttgacattgttcgaaacgatattctgaatatgcaggtggacgccatcgtcaacattgccaatccagaacctatccttggctatgactgtgatactggcattcataaaaaagcaggcccagagatcctccaagcaaaaaaggttggatctatcggcgttgggcaggttgttaaaaatgagcgataaaagcaagcaataaaagatgacgataaaaagcgtcgacaaaaatgtgacggtaaaaactgacaataacaccacactgccgaaaggagctgggaccggcgagtctcagctccttttttcatactgactattcctttttctctgatccattcaggctggcccagtgctggcgcagcagccgttctacttctctgcgaagggaattttggaacatgacagccataaccaatgcgctaagcactgcagccacagactccagccagggatatgcggcccaaagctgttctccccagcaagcaagcggaacaccaacaagcagcataaacagcaaaataatgatgacaacgtcgggtctgccgtagccttcacgtcttttgattttggcccgtatctgtcgaagcgcacgggctcggatatcccggatgtttctggacgaacactgtttgtcctgtgcgacggattcagtggactcgccattgatgaccgtgcggaacaaaatctccctctgcagttcggtcagtgcatgcagggcgtcatagatttgggtgtccagatacatgaagggatcttcatcagaaccctctggcagatacttgcttcggtcaaaccaacgtctgtcattgtaaatcgcattgcgtacttcctccggcaggaacgcttccggattgtaagattggggctgctttatatccacatcctccagagtatccggtgctacacgcttgtgaaagttcgcctcgctgtagtagagcatatgctccagctccttccactcctctggatgctccttcacccattggtctgcggcagcggtagcttccgggtccatttcatgtatccagcgccagtcagaccgaagttctttgtacgactgagtatctttgaaggacatgagctcaccaccctttctgcgttcacaaaaaatttacgattccagaccttccgattttgcgaattttctctaagtaataatagaaggacaatttcacccgggtgaggttgcccctggttcggtacggcacggtatccgcgccgacgaatccacatgacctttgacagagcatctatgagagcatgagcgctctccgccatacggcgatccgctcggaaggtcattccatctctggccgtgttcccgggagcacggcctctttttattctaacacggaggaggcgaaaaagatagtttacagatgagggcaaaggaggaatgtggatcacacagcacacccgaaaaacaaaaaccgccgtgactgcggcaacagtccggcggctcggcgcacacacaggcacgcacaaatttactgataaaagtatatcaggtaaacagcagaaaagcaatgaaaatttttctgttccctgtgtgagcgtcatcggactctacgacaatacaggaggtatgaattgagtttcaacaaatggcccaagcgcagcgcagagaaaaactattttatggtaccaaacgagatattcagcgtcggtctggattttcgtgagatctccatctattcctatctgctccggtgcgagaatcgtaagacctaccagtgctaccccagttacaaaaccatcggtcatgcgatcggcatgagtgaaaatacagtggcaaagtatgtgcggcaactggaggagaaaggtctcatctacacggagccgacgatggtacgaagcaaagatggcagacccctgaacggaaatctgctctacaccatccgccctatctcaggtgtactcgaagcgttctatgagcggcagttccggcaggcagaggaggctgccgcccgctatcgtgtggcagaactcctcaaaaagtccaacgcacagggccgccagaacgccttgtgtgcgcctttccgggaggaagagagtcccagtcccaaccagggggttgaaaccggatgtgagccgttttcggagggatttgagaggacgaaagaaaaagcaggataaaggcatggcgtcgcaggcgtcgccgcagccgccacttctgcccgcagtgcgggcagtttcggacgcttgaagctggcgtctttgagagacaaaaaaagctccgatggcgtcagcttccccgaaaagccccgtgttgcagggtttttcaaggatgtcttacagcaaaaaggaggaattgaatgagtaaagaaaccagagagcgcattgcattccggatgcagccggaaaccagaagaaggatcgagcagtggtacgccgccgacaactgccagagcaaaaatgagttcatcgagaaagccgtgaacttctatgtggaccatctggagatacaggacaaccaaacgcttttgcctatggcgatccagtctgccattgacggcagactgagcagaatggaggactatatcgcccgcagagattttaccagatgcgtggagcaggacatgaccaacggcatcatcgcggaagcgttcgagatggatcaggatgatctgaagcgcaggcgggcacagagcgtccggaatgtgaagaccacaaacggtctcatctcgttggagaaatacgcacgctcccgtcaggagcaggactgggatgatgatgaatggcaagactgatcctcaagagcccttatatcaaaagcaccggaggagcctccggataccttcgctacatcgcaacgcgggagcgggtggagcttatcccggatgaccgtccgcccacacgaaagcaggagcagctcatcgccaaactggtcaaggacttcccggacagcaagacgctctacgagtacgaggactacctgacgaagcccacgaaagtcaacgcctctgcgttcatcacgctggcgctggaagccaactgggatgccatccacgagtcagaccagtacatgaagtacatcgccacccggcctcgtgccgagcgcatcggcgcacacggtctgttcggtgatgaggaaacggtctctctggagaaatccatggaggaattggagcgctacaccggaaacgtgtggacgcatatcatctctctcaagcgggaggatgcggtccggctcggcttcgataacgccgcggcgtggcaaaatctcattcgggcgcaccgcaacgacatcgcggcggcaatgaagataccgcccggtgacttccgatggtatgctgccttccacgacgagggcgagcacccgcatatccacctgatggcctggtccgcaaagccgggacaggcctatctttccaaagagggcatccgtcagatcaagtccaagctgaccaacgatatcttccgcaacgaaatgctccatctctacgaacagaagtcagagtccagagatgagctggtgcgccaagcgcggcgggcgatgctggaactggtgcgtaccatgcaggacagcgtatgtgaccacccggatgccgagcggctcatgctggagctggcggcgcagctcggaacagtcaagggcaagaaatcctacggctacctccccaaacggctgaagaatctggtggatgagatcgtggacgagatggaacggctcccagccgtgagcaagtgctatgaccagtggctactcctgcaaggcaaggtggctgcctactaccacgacaagccccaggagcgcatcccgctctcacagcaaaaggagttccggcagatcaagaatgcggtcattcaggaagcggagcgcctgcgcttgggtgagatcggcttcgaggagaagggtctcaatcagcaggacgagccggaggaataccgcaacgcctcctacgactactggacactgcgggatgagatccgggacgagagcctgaccatggaggagcgcggcgaagccgtctctgaaatggaaaagctggcggaaagcggcgatatgtacgcccagtacctgatgggaaagctctggcgggacggtcctctgctgatacccaactcggcgaatgcccggtactggtttgaacaggcggcggagcaggaacacattgtggcgcagtactctctggccaagctgtacctctccgatgatgtggaggtacgggatatccggcagggaatgaattggctgtacaccgccgcggtcaacggaagcagctacgccatgtatcggctggccaaggaactactcaaaggcgatttgatcaaacgaaatagtgatgccgcggtggagtggttcaccaggtcggcggagagaggaaatccctacgcccagtacatgctgggcaagctgtacctcaccggaaaggaactcccctgtgatgaggaacgagcaatccactggctgacccgatccgccgagcagggtaaccagtatgcccagtatctcctgaaccatctggaagaaaaccgccctccctctgcaatgctggcagtcacccggctgctccatcacatgagccgggtgttccgggataactccgttcccaagtcgcgccccggtggtatccaaatcgaccgtaagcggctgaagaagctgcaggagaagcgcatggccctgggccacaagctggatgaccatgaggagcagtggcccaatctgaccatgtaagaggcgcaaaaactgggccgcaaaacaaagaattaaatccttctgggcggaaggtagaaaggaactgaatgagaaaatccaaatacaattcttttgacgaactcccgctgatgctgaccgtggaggatgtgtcccatgtgctgggcatcggtctggcccacgcctacgaggtggcccaccgcagggatttccccaccatcacactgggaagccgcatcatcgttccccgtgacaaattcatggaatggatcgacgaacaggccgcgaaaaaatctgaaatattttagtagctattccaaaaactctgtggtatgtgtttgtgttaaaaaggagggatcataaatggcaaagaaacgagccaacggcgagggcagcatccgcaaaaagcccagcggccgctgggaaggcagatatacccagggcatcgacccagtcaccggcaaggccatccaggaaagcgtgtccgccaagacccaggcggagtgcaaagaaaagctggcgaaagccattcgggaaaaccggggcgtgccgctcaatcacacgggcgactacaccgcagcggagtggtgccgcctgtggtttgaaacttacaacaagcccaacatccgctacaacaccgccaagggctatgaagggatcattgaacaccacatcatcccggccatcggcgcgatcaaactcaaacagctctcgtccatccacatccagagaatgtataacgacctgaaagaaaacggcaggatgccccgtggggcgaaacagaatgacaaagccttgtccaacaccttcgtgcggcgtgtccatgcggtgctgcaggcggcgctgaagcaggcggtgaaagagcggctcatcccgtacaacccctgcgagaactgccgcatcccgcccaaggacaagaaagagatgaccatcctcccgccggagaagatcggcagatacctccaggaagcggagaagtacggcgtcctgcctatgttctatctggagttgtccagcggcctgcgccggggcgaactgctggcgctccagtggacagatttgaatgtaaaagagcgcattctgacggtgaataagcaggtcacccgcatggagggcgagctggatgtgacagaaccgaaaacgaaaaactctgtccgcaaggtggcgctgtcgcagcaggcggtcgacctgctggtacaggagcacgagcagcacccggacaaccccatcctgttcccgtcgccccgcacgggcggctactggagtccggacgccgtgtcgaggatcaaccggaagctgctgaaaaacgcaggcatcgaggagcacgtgcgctttcacgacctcagacacactttcgccacgatggcaatctccagcggtgtggatgtgaagaccctgtccagtatgctgggccattacagcgccgggttcactctggacacctatacgcatatcaccaacgatatgcagcgaggcgcggcagagaagatcggcggcttcatggaatcggccacggctaagccggaaccggaaccgcctgatccgccggaggagagccggtgcaaggtgataccttttgaaaaggtagtctaagtgagcaaagggattccctggatcacttttgttgtccagggaatccctttaggatgtattagaaaacactaattactaatatggagccttcagtaatcacttcgactatcttgaaattcctgcaatgcaacccaaaacggcgaaggttctttactgaaccatctcccatattgattttgcaaattctttgaacgaataagaatacacgcttttcttgcacgactaactgatacaaaacaaagccttcgggcttctgccagttttcttggagtgttatcatagtagctgggaaagctatccttttccatgcccggcaatatcacaacatcaaattcaagccctttggagctgtgcctggttgttaggacaacttgattttctgggataccaagccgtgttagaaacttaatcgttagctgcgtatcgtggcttcgtgctgtttcgagcaacttattgtaattatcaatctcgtcaggatatcgctctgaagcagtaaaagcagaaacaattcccacctttttgtcaagatagcataaccattccgatagattatccttataaaccttacttgcagttaaagtttgaaaaattgttcttttaagtaaaaagtaatcgtcttcactaatgatccgcttttgagaaataaacgatttccaagttgagcaaatttcatcaaatgagacggagcatttatccgaaacccactttgcacagttttgaatccagataataagatctgttaatctaaatgtttgacgagcaatatacgccggaatattttgtctggaacattcttgtgccaattctgttacttgtttattatttccgactaaaactgctatttcgtggtatggtatgccttctgtgtgaaatctggatatctgctcaataactctttcatattgttcatccatccctttggaacattcgatgaattccagtttggcgtggtagtcttggagctttccagaagcaatatatccccggctactttttagaacatattccgaggcatctactattgtttgtgaacttcgataattgtttttcaggtgaatgcaagaaacatcttggcgttggcttaattctataaggtaatcaggagctgctccttgaaaatcataaattgattgatctgcatccccaacagcaaaaactttaattcttgtaagatttaatagcgttaaaataagttcatgaagcggttttcccaaatcttgatactcatcgacaataatccaaggatacttagcctcaagtgctttgcgtacataggactcatttttaatgagttctacagattttttcaccatgctgataaaatcgagatactcgttttgtatcaagagttcttcaaaagagatggcagcctttagtgcaatatcatagctttctatcgcaacacgactaattccctttatattccttgtgcgctctttatctacatcaatgagctttggagttccctcataattctgagaattaaagagacgattcttttcagcttcagagataatccggataggcagtggtattttgtattgcggatatagggctgcgaaaggagtaataatttctgaaagacaaaaactgtgaactgtaccaagaaaaacatttttgcgcttttccaaccctaactttactaaccgacttttgaattctcggacagcctccgtactatatgttaaacatgcaaggccgcgtggtggataaatcatctcggctaatagttgcataactttcaaagtcaaaactgttgttttcccacttccaggtccagcaattacaactgtattatttacagctttatatgcagcaaactgcatgtcatcttcgcttatttcctgcaattttttctcaaaataagcattcaccacattcacctaacttttgcaacaatcgcatctattgcattcgatatatattctggaattatcgaggcagatatatgagtggctaaccgttgagcgaagcggcctttaccgattccactataagttgactctattttggaaaggcacttgttataccttccagaggaaagctctgcagagaagttatttttttgaacctggccaccatttgttagttgattaaaaatagaacatagaacatctcgatctggcccagtggcctttttgaagatatccacctcaagtgtgtattcaccaatataagtgccaaatgtttcaaagtatttgcgcttttcctcattattcaaatggatatactccggatcaacagagccttgatacattcgataaatacgatcaatcccatcaaagcccttgcccacatggtttgcatcttcaatatctccaaaatgctttttttcatcaactatatgataataatcaccatcagtgataataacataaggaataccaagtgcacctacgaaacgacaatacggttcaaaattcgtagaatttatgttacaaatcactacgccgagacgatcaaggtcgtatcctttggcttttgaaaaactgggaaccaaatattcttcggaaattccctccacaaaaataatacctttagcagtatagagttcgcctcgtttgacatcaatgtatcttgttaaatccgcataatcgtcctcagacaaatcaatgcctgctgttgtttttacctcggtaccatcttttgtcgtaattagatgaacaagagacgtaatgggtgcaactgaggatatatgtgttgagtgagttgtgattattacagaggtgttagttttgttcataatatggcgatagagaagccgttgataaattggatggagatgcgattcgggctcctcgacagcaagaatggtgatgccattcgctgttggaacaaaatccgaaaagaacgcatatagaccatcgtataatgtggcatcttgcagagccgcaagattcaaggcgtagtcatcggagctggcggatttttcataacttctttcaagtaaatgttcatgatcctgttttatcaattcacgatataaatcgccggataggaatgttttgatagtatcatcttcaatgagtagtagaatcaaagctacatagagaatattgttgattcccaaacttgtgttgcccgtttctcggctgttaattagaggtcgtagggcataaagaagtttagttgcatcgatattcattgttttcagagaaatactgaactcatctgcactaaaggacaccatgtcattcaataaccgttgcagcctattctctaaatcatttacttgaccaatttgtaaagtatctgcacctttttcatcaagagcctttgatatctctaaaagtacactcttgctgacagaatatttttgcttaataatttgtgttagaggagaagttcgggaacttttcatttctgcctcaacatcacggatggcttttatcacacgaatattaagcatttttcgatcttcatatgtaaaagccctgctttcatcgtttcccttatagatgatgtagctatagtctggttttgtagcatcttttttaaaaaacttgtagctgatttttaatgtttctttgccttctaccattaccgacgcatcagccaactgggcaagcaaattcttattatcctcgaaatttgcgagatagatctcaatcaatatataatgcccattatccatagggttttctataccatcccaaaaatcggattcttcaagcattctgtctttttcagaaagcgttggatcaagaatcagttgaagtgcgtaaagaagattacttttgccgactgcgttttcgccaattaatacctgcttttcgccaagagaaaaatctgctgaatggaagtttctaaagttttcgatatgaactcgacaaatatacggttgagttttcatccggtttaccttctttcgcacgatcttccagtttcttgttccagcggaagtatcaatgatatactctttgctacatgtagtgcagtgaagatatacactatgctctctaaatcctggaatgttgtcatgctcctcgataattgttccttttccacatggacattcgtattcataatattctgtgtcgccagcgcctgcaccgtatcctgaatgctgttcacacttagcaataattcttttagtccgcatatacatctgcccctttttgcaaaaaagccgcgtgggagtacacccacacggcggccttggtgatacaaaggctcaccgtaaaataattataagggataatgccgaaaaattcaagtttccgtcgtatctgcggcgaaaataccgagttgcacccgttagggattggttagggatttagcggtttttgccactctaccatacaaggctacaacgacaattttacctctctgaccacagttgaaatgtggtcaagtgaaactcaaaaacaaacttttaacgcagaaaaaccgcctaaaaaggcggtttttcaaagaaaggtggtcggagtgcagggactcgaaccctgggcctcctgctcccaaagcaggcgcgctaccaactgcgcaacaccccgttatgaagttaggcgatccggctgggcgtattctcccaaaccacccgcgctaccaactgcgctaatcccggatattcgatttttctgcatgatactatgcggagaaggaaaaagcaagtttttcgtgtctgtgggcagtgctgtggtcaaggccggttttgcgggggatcttcaggcgggggatttccgccacaggctactgtcccaaggacttccgggctttcacttttgggggaatggatagaccgtctatcctcccaaagcaggcgcgctaccaactgcgctacacccggatatgaagttgtggggtggcccgggcgtattctcccaaaagaggttctcagcattttttatagttgtttatagtaatttatcatcatttctgctccaacccagttactttctagcgatcttgtttccactgtttccgtgtattccagctctgtctgtggtcttgcatgtggtcagcggaaaagtttcggccagaatccctgccccacagtgacaccctaggtggtacaatttacctcaaagtttgaaaaatggtacctctatctcgaaaaacatacaagacttttttgagagaaaaccgatcaatttttgtgtcgctatatcaaagaaaacatctgtcaagaactccccccaaaaatccgccgtagtctctgaggctacggcggattttcttgaatgctcaattgctacaggtgcccggattttataatggccctaaaagaggttgtcattcaccccatctcttttttgccgatgatatttcaggtattggagatgcgcttgacacaaccggaatattcctataaagttaatcttgacaaagctggctaccaaaaaataacaggaccatactctttttgattgcttgctgtagaaacaacccagagaacagtcctacaaaaagttttttcacgaataagcctgatgctttagatactttagccgttctctctgcctgaatgggaggcctcaaaatgaatctttttgatttactcaatccgagaatgttccggccgctgacagggcgaaatcagcgcatttatgctgacttgctgatgctgatctgggacagatgcagcacatcccaggactacagcatcgggaaaggtgctcttacagaactggcagagacctatatggaaggactgggcacgatcctgccgcttgatgaagaggattccccgggcgaatcagccacggatgccaggagccaaggattgctgtttgtgcgccgtttacgggacgcagggtgggtggaagatctggagggcggatatgaggaggaaaaccgcacggccctgtctgccctggctgtccgtctgctgcaactttttgatgaactgctccatcccaagactgtcacatacagcggaaagcttttaaaggcttatcgattgctccaggacatggagcacgaaaaaagcccttatgaaaatgtgctcaaagaggtctccgctgacatggcggacctgaacacctctctgcggcagctcaatgcatctatcgggagctacatcgaccagctgactcggaatcggacccctcaggaagtcttggacctatttcagcaatatgaggacgaagtcgtggtggcggcctaccaccgttttaaaaccagtgacaatctgttccaatataggacagagatcctagagggcttggatgcctgcaacgggcagtatgctgaggcattggctgcggattactgcagagtggagcgggtcagcgagtcggaagccgccattgcagtacgaaggctggttcagaaagtgcgggatgatctggagattatgcgggatctgctctcggagatcgatcgcaaccatgtgacctaccggaagcgggctgtgcagcgggcacagttcatgctgctctccgacggctccgctcaaggaaaaatcagcgatctgctgcggtattacgcccaaaccattcagcgcccggaagagctgttcgagccagacgagagccccttgagccgccattggaaattctatcccacagagatcctaggcaggaactttctcaagccagccgttaacagccgaaaacccactcctatcgagcaggcacctccggaaccgcccatatccgaggaggaactccagcgccagcaggaactgctgctggaatatgtccgccaggcggtcactctggaaaatgtaaatcgttttgccggccaggtgctgaaccaccgagagacggtttccgctctggaactggcttccacgcaaagtcaggaatttatcaaaatcatcggacttcacacatactcacaatcccccgaccgcaattatgagatctccgaacaggaggaatgggtctcctgcggtgggttccgattccagcagttctggatacgcaggcgaagctgaaagagaggtttctatggacgtaagagaggtcgccaactatttgctcaaccactgctttcttccgtcgcaggcggaagacctgctggaaaagcattactatgcggtcaatcacttggaggagctgcgccggatcttcaagccccttggctatacggttgtctaccattccgcgcctctgaaggtgatcgcactggtcagcgagtatgagggcaaccaagcgaagctgaataaatatgagagcatcctgctgttaattttccggctactgtatttgcaaaagcgggagaagctctctctggatggagcgcatgtcgtcgccacagtgggagagatccaggaggagtatcaaaagctgggtcttccccgcaagctggaccggatcacgctggaagccatcctgcggaccctcaagacctacaatctggcaaagccgctggaccgtctcaccgaggaagaagccaaaatcgagatctatcccactgttattctggcgttgccagacaatgtcctgaagtcatccagggatgagacggcagcggcactggacaaataccgcaaagccggtgaggaggatgatgtatgattgcactgtgccgcctgcggctgatcaactggcataattttgtcaacgaccttctgaatatccagcagatcacctatctgatcggcgtcaacggtgtgggcaagaccacgatcctggacgccctgcggtattgcctcaccacgagcaaaagcttcaacgccctgggcaaccgcaagagcaagcgaacactgctgggctcggtacacggcaaacagcgggatcaggacggagaccgtccccggtacagccgcaaggggcatactgtatcctatgtcggcgccgaatttcgggatgataccgcagcccctgggaaggacacctttgtcattacggtccgggtggaatctgagaaacctgacgaggacatgcgtcacgtacagcagcgctggtacatctctccccggggcgtcatgctggaggacctccccttcctgggccccgactatattcccacaaagcgggaacagttctgcccgaaaaatgggaaaatgcgggataccgacaatcaaaagctggcaaaagacctgatctgccgcgcgctggggattggagcagcagactccccgttggggaagaaattctgtgcggtatttcccatgggtaccgggatggacgacattgaggacttccgggaattcatctatcactacatcctcccccagccggaaattgacccccaagcactgcagcaggagcagatcgaattggatcatctgaacgacgtgctgctccaggcaaaggagcgggcgcagctgctgacggagatcggtaccctgggtgaaactgcccgttccaagcagcgggactgcagagtgaaccaggggtttgttctatatgccagccaacaggcggcagagggggcagaggagcagatcctctctgccatctgcgacggaaaccgggagatcgaccgtctgcaagaagagctgcagtatcagaaggagcggacggagcaggcccaccagcggtggatggatgccctgcgggaaaaccagaacagcccggaacgccagcagctgcaggtcttcgaggatctggtaaaagaccgtgaaaaagactacacggaggcccgaaaagccctctcctctctacaaaacgccaaacaggagctggaagccctcaatcgaaagctgtccgactgcagacgagcacttccggccgaacagatgccggatgccattgagcagctgccggagcagcggcagacggagcagctcaccgccatggaacaattgcttcgggagcgggaagattccctggatcaggaggaatttcaggtccgaagcgatctccaacagctgaaggagcggcaaaaagcccttcaggcgaaaattgaaacgctggaaaagggccagttggtctatccggatcaggaccgggcaaaacgggtctgccaggccatcaaccgggagttggcccagcagggtatggaggccgatgcccgcattctctgcgagatcctgacggtacaagagcccgactggcaggcgtgtatcgaagcctgtctgggaaaccgccgcttcgacattttcgtctccccccggcattaccgtaccgccaaacgggtatttgagcatctgaaagccgaggtcggacaggtcagccttctggacagtcctgctctggagcgggatggcgaaaaagacgccgcctccccgcaactcagtactctcgccgccaaagtcaccagtgaaaactggctggccaaatactatgtgcagaacctgctggggcaaatcgtctgctgcgatacgtcggaggcgctggaagcgtatccccagagcgccacaaaagatcttctgcggcactatccttatcggttggcacgtctgcgaacgcccgtgctgtatatcggtatggaagcccgcaagcagcagctgaaagctgcctgggaggagttttcagctttgcgcggacagctgaccgagtgcaccgcccaggcacagtccctgcgggatattctggagcaatgccgccgcgttctgcacagcagcgttctggaggatctgcgcaaaaactggggcagcgtccagcggcaccaagccagttggcaggcgctggagcaggcacggcaggaatacgagatgtggaaggaaaatcccattctccaggcaaagatcaccgccgaacatctctgccaggaagaatggacgcggcaggatcaaaagcgggtggaaatcgaagccaccctccgctcccaaacgaataaagtccaggaaaaacaagggatgcaggagcaggccagccgggaggcggaagacgccagagcaggctggctggcgttttgccagcaggaacccttgctgcagacagaggtagagaaaaaatatcaggacgcagcccgcagccgtcccccggacaagatcgtccaataccaaacgaattatcaaaatcaggtggataaagcattggacgaatggctgcgggatcagctgatccccaggcagcgggagtataacaccatctacacctgtgattatcctctggggctggatggcatcgagaccttccgggaacagcaggaacggctggttcatgtagatctggaacggtactctaccagtctgcaccaggcacaagaacggtgccgccagcgcttccgtgaagacattctttatcggatgaaggacgatatctataacgccaagcggcaattccgggaactcaaccacacaatggaaaacctgcagtacggtgaggaggtctatcagttcgttgtccaggccagcgccgatcccgaacgccgggcattttatgatgtaatcatgcaggacagcaaccggcggatccagggggacggcagtatcgaagattttctggcccgcaatgacccggcctacgaaacgcaggtggacgaattgatggagcggatcctagcagagctgaaagccaatgcccagcgccgccaagagggaaagcatctggccacagagctgtctcgctatgtggactaccggtactacctggaatatgatattgagtgccgcaaccagatcaccggcggcgtgacccgcctctctgcggtcagtcaggacagcagcggcggagagaatcaggcgccgttctatattgcaatctgtgcatccctgctgcagatctacgacaaatgcgagaacagcattcgcctggcactgctggacgaggcgttcagccgcatgaccagcgaccgcatccgccccatgatgcagatgctgcgcaaaatgcagctacagacggtactgatcaccacagtggaaaaggcctcggccatccagccctactgtgacaccacctgttccattatcaaaagcggtacgcgcaatgctgtccgcccattttatcaggatgtgagggaatgatggactacacccacgaaattctcacggcgatggtggatcgctatgaacgcaggaaaggaacttctgcccagaacggtaagccccagcgggcggtaacctttgatctcgcaaagtattatcccatataccgggaccacctgagcgaggaggagcaggccattgacgatgcggtgacgcgcctttccagttggcagatggttgccgccccccgcagtgcccagggatactacaccaagattactctgcggctggaccacattcaggaaatctatgaatttttagggcggaaaccagcccaggaaacccggcaggagcaactgcagcttctattggatgcccagagacaaaacccggatactctctccagccgcttcgccggagagctgatggccgcactgcaggcaggacgttcaccgggatacggccttcaggggaatgttgagaaactacgggatgttctgctggctctggaaaaaatcgggcagttaaacaaagagacctatgtgcgcaacttttccgaggccgtattccatgactccaagcactttcactctatttccgggattatccgcagtattctctccgatttgacagaccagccggtagaaaagaagcagatcctggaatattacaatcttttggaaaatccaacctacctctatttgaaaggaggctggatattggagtttccggactcatgtatccgtgttactgatcttccaggtggtatcggtttgacctctgacggtttgagtgccatacggtctgtccttttggagccccggacagtcattaccgtagaaaacctcactacctatcacgacattccctcagacgatcgagccgttttatatctgggtggtttcccaaattccgcacgggcaagttttcttcgtatggtttacgcttccaaaccggatgctgtttatctgcattatggagatctggatccatacggtcttttgatactggaaaacctgaaacaaaaaaccggaattccatttgccgcttcaggaatggatcttgctaccctgcaagcttgtttccaggcaggacattaccgtccgctgaccgcagaagatcggaaagtcatgcagtcacctatgctctgtgcctaccgggaaatatttgccttcatgcaggcacataactgtaaagcggagcaggaatctctctctgcaatgaaattataactgccgccctggtatccataggtcggaggcaacttgcaaggcagaccgttctctcttgttgtacggtttattctgatactattatttttttctaatcgcttttaatgagttctagtcccaaagaggtttccggaattttttataggcgtttatattgctttatagtcatttccgcttcaaatcagttactttccatcgctcttgtttccgctgtttccgtgtattccagctctgtctgtggtcttacatgtggtcagcggaaaagtttcggccagaatccatgacccacggtgatactctaggcggtacagtttacctcaaagtttgaaaaaatggtacctctgtcttgaaaaacatacaagagatctggacgcacataaagttccacccgaagagacaaattacagcgtcattgccaaggggccaaggtgacccggcatacggtatccaaaccctatgagatgattcaaaagatgccgggaatccaggaaaccgctttcccttactttgctgaattgccaggcagaaccgcgtatgatatgatggcaacagaaagcgaggaggtgctgtcatgcccgtatggatgtcactcaaatgccctttgcaaagctctatcctctgctggtggcaaaagcggagcggaaaggccgcacgcgagaagaggtggaccaggtcacaacctggctcaccggctacaccgccggagacatcgcccgtctggaacagtccacggtcagttacggtgacttctttctgaacgctccggttctaaaacccaatcgcacaattcaacatccggtcaatggtggaggtgctcctctccgtttttccggtgaccgtcttgatgccgtgagattccagatactttttatcttccggacgccgtttccctggatgtagaggtcaaaaatctttcggatgatctcggcctcctccagtacgatctgcagcactccattcggccccttagtatagctcagaaactgtatgtaattcaaaatggttttcccgctccgcatgcgattctgaatgccaaacttaatgttctcgctgcgagtttggctctccacttgtgcagaggcagcatacagatcgatcacgctgtctggcggcttcatggtaaagatacctcctaactcaatgtaaattcctacgttcatttatttcagctttctgattgtgctaatagcttcccgggcatctcttccaaagcggctgagcgatttgacaaggatcaaatggatcttccctctccggcagcctctcaggatcttccgatagcctgagcggtttttcgtgtgcaatctcgacgcttggtccgcgcaaacagccacgaatcgccacaagggattactctgaatgaaagctgtataatacgcgatctggttttccaggcttgaattttgttcctcctgattcgtgctggtacggcaataggttgccccccgcaactgctgattccaaatagggtggtcctcctgcgtctgcgggatctcaatcacatgttgaaacataagaacccctccatgatacatactgtcgatcagtttatcatggaggggtagaaaatgaaaaagctacatttcagttcaaggaactaaaatatagcttttaacatgtattgtgcgactattatagatgtcgcttgagagcctttattcattagatctaaaaaaatagatctaaaaagtataatggtagcattagttattatttatttcatagagttctatctcttgttcctttacatataccccaatatactgaagccagttggatgagctacctccgatgaccaacaaaattggttctggacatcctaggtcttcgtctttagataaattgaccattgttttcaaatctagtgcagatggcttaggagaagcattgggatgataatgccactcccctaaataatattgctgcttttgccacgctctttttagcttcgtaataatgccccgcgtactccgtacgaatgaacacaaagtttgcttggattctgctggagctcctgttatagtggttatttctgcccatttcaaatcatcagagtatctgccgatgaggattccgcctgtctcataaggatatgaattcatacataaactatgaatatactctagctcctgatccggcaacttaacaccatagcttccattaaagctctcgtaatatttaaaggtctcaattttctcgatattcatattgtttctcaatcaatcgcaggccattaaaaagtccatcttcagtctgtgtttcatagattaatgagatccctttttctgttgaattttgtacaaaagcttctaatgccttgactgtggtacaagcggcaaaccacatatcatctgccctggcaggaaataatggatgccagcagccaatgccatcccgaggaagcgcatctagattaaaatcattggaatctttttgaaaatatggttcgactaaattaagaaaattttcaaagtgaggcagttttgtcctttgaatattaatatacagtcgttttgcaccaagtccaacagaacttgagcagaatacaatttttcgcttccactctgttgcagataataacgccaatacttgatcctcgccagtggaatcaatgataatatcaaaactgctcaagtctggtactaatgccccagtttcatctatatctaaatacctttctgcataagtagtgtgaatgttagggtcaatattcgttaaccttttagctacaagtttacttttggactgataaagatctgtcatacataaagtatgacggcaaagatttcccatttctaaagcatttccatcgatacaggtgagttgtgttgccccagcacgagtcaacagttctgcaatagaagcgcccaagctaccgagcccaatcataactatacgctgattcgcaagcctatttgcaagctttccacgccccttaatcgtgcgtgcgctccagttttcgctgcgaatccatgatagttccatactatccaggaatatctttgctttgtcattcatccaccagcccgcttcactcgggcggtagccttttcttgctccgtaagtctgaggaatgctaagtcgcttgccagaatgaaaaactctatttgtatattttccgcaggatagagcaggaagctctatagcctgccaagtcatctcgtgggaatcttcaccgatatgtgctgggattggaaaaccaaccaaaagcagatgccgcctcccatctctggctttgggggcaaatgatttcaaaatggccagcaaatcaatgccctgattagtgcatatctgcttcaactgacataggttagtgggaacttgccagttattaataactggtacttcttttaatctgatccaaagtgcattttcatagtttttttcccttattgccgttccccaaaccggttgatagattaccttctgagaatcaatggagcgaaagctccgaatcattgctatggattgctctgatgaaagttgcctacgaacgattcttgcaattccacaacgctcatccgtactttcccagatcatcatggaaacacaatcctcttgaaaagcaaagactgtctgtatatgagagactggaaaatctggtaactcaaaggcatccccattttttattaatctctcttctgcagccgcacggagccacaaaacagctctttgcatattccaaaagagccgttcatcaactgtgaacggctctttttcaggaacgcggatgccaagagtctgatcaataagatcaacacagagttttcctttacgccacaaatggttttcttcctcaaaagcattgatcgattgatgtggaaatgtatttgttatactatttttgcagctcggatatatagcaatagttccaaagggataaacagtttccgcagtaacaaaccattctgttactctgggaatatctttgccatcatggtccaaacaaaccctaatgtgaagataaaaacgttttgtaactacatcccaagtccaatctttcagcaaaattatttctggtatttcttcaatccggcgccgcccgcgtcgcaaattctcagttggattctgactcatccaaacctcccaacaggaacgcccttactttcctgtactctcggagtaaatcctccgttttttctataataggatggaaattcatcgcaatctttgaagaaagatttccaaaggttaacactctcttctatatcagcgctatcataagctgctctagcaagtcttgcaccgccgcaaaccgccttatagaaagtgtcataatcctcatctgagagcatctcaaatacgtcatgctcaggaacccccggtctgggaggaatggctttttaggataacattccgcaatgcactccaaggttccgacgatgccctctgcaacacttgtgattccatctggacaacactctcccacaaaatgttccaacggatagcttttcggatgcttgaggctaggtagttccaatcgtcgccaccatttgatcgctttaactacatttacataattacctttgcaaatttgattttttctcttggtccaacggatctgctctaaaggatgcgttcgataccattgattttcgacattatctggaatcagtaaaggctccgccctccattgttggccagtagaatcactttcgaaaaatctttccagtgaatctaagcggtaattttccaaaagtgactgctgatagcccgagagatcatcgactgtgaatgcggatgaaaggccagcacattcaatggcccttttcacctcttcgctgggagctgcggtaattactagatccatatctacttcgggcaaagaaataccgatcgaacgcttttgctgttcgtagttctgatagtacttctttacaaagggtgtaattatggcaaatgcttcttgggcagaaacggtatcatgatcaatattagtaactacaattacatctacatccaccttttttcctggtgctggtttaatacaagttgacctagcatagctaccctgtaaaaaactttcaacgagtaaatcttttgtaaggtcatcagatttgagttgttctcgaagctcggtgtgtgcggagatcaacgcttttttcaaactgtcaggtagccgaatattagtcaagaaatcctgaaaataagtttgtattgcgctcattcaagtcctcctttcccgtcaaactgaatggacggtatgtaagagcagttgcctcgttgttcaaaatcatattcgtacagaatacactttccaaatggacgggatacttgcccaagatgaaacataaacgcattaggcgcggcagcaaaaatatggagatatgctcgcctttcaacggtgcttcgtcctgccaatgcggcataaacttccattgccagttttgaggagtgggtgccattttgaatagaaaagccagtgctacctgtgtcctctggtgagaaattaataatccgtccaacgtgaaccccctgttctttcaggtatcgctccacatcagagcaaatattgtgcctcacgttgaggataagcgcggtgtcaaatgtatcttcatctcttgctatatgttctaccttccaattctgatattgggttcgatcgcatttgtcaaattcccatatttctggtcccaaaattgttttttgaacaggacaaatatccacaccggatttagtatcaaaaacacgacctgcagcaaaagcgatggaaccatgggcttccagcataatttggtaagcttgctgcacctctgtattttctctcaaaaaatcttgaacaggcttaccgatatcaaccgtccagtcaaaatccggtttcaaaaatctaccttcaaatttgtcttgtaaatctaacagaattgacgtctcttgggtaagtctttcagaacctcttgaaaaacacaaaattccaattgcttttcgtaccttggtgtacttcttgataattaattcgattcgcttgttcaactccaggctgaaaattgttcgatcggtatagccatcttttgttgattgaagaagttcctcctcaaccattgcgtccacaagtaaagatacttggggatgctccaaggaatgtccactatcatatgcatatttccaaagagcctctcgaacaaggctcttcaaactatctggatcgaatggcaacactttaaaatccacattaatatcttttagtaattgagtttcaaatttttctaactgttttttacctgttgcatccaacttacccgtttgaaacttggtaatagcgttcataaaatccacagctgataccgcacaatttccgattaaaaccaagcaataccgctggcagggataatcagtgatgatatcttttaaccacttagaaatatcgccctttgaaaaagagttgaccgtcgatttaacttggatcgcatctgtaattgtatctgcgctctttaaagcaatatctaccttgtcaccttctgttggaaattcaatgtaaatcctatcccaatcatttcgccttaatgcttctagaacagcaacaatcccttgatatagataacctctgccgccttcttttccgcccataatacgcctttctatttattgaaagagtacaaccaactgattacaatatattgtacgaagaggtggtaataaagtcaacatatcaaggaattatttaccaattattaatagtttaaatagaatgtgctatacaacacatcattcaattatcaactgcatgacttttacttaatgtaaaaaattacattagcccgggcggttttgggtgtgctgtcccgatgcctggccggcgtaaacagctgcaaaccgccacttgggattactctgaatgaaagctgtataatacgcaatctgtttttccaggcttgaattttgtttctcctgattcgtgctggtacggcaataggctgcaacccgcagctgctggtctcaaataggatggtccttctgcgtatacgggatcttgatcacatgttgaaacataagaagccctccatgatacatactgtcgaccagtttgtcatgaagggcgggaaaatgaaaaagctgcatttcggttcaaagaaccaaaatgcagcttttaacatagtctgaatgtcattaaaggatctgtggaaatccagtaatatcaatggtttgtaagcagtcggcaaaaggcttcatcttaaattgtacgctcccacactttcacttgcgtgattacatcacgcagacgatcaccaccaaccatatactccagaatttcgtcggcggtatcacaccatttctcagtacgagtgtttacttccacagagccagcctgacaaatcaccattttaggcgctgcatctgccgcaggagaaatacagccaaagcaacagtacagcacgccattccactcgaactggacttcgccgccgcgccgcatacactgtttgaaatcactgattgttttaaacctattatcttcaaggctgtttgtgccgacccatgttgccatgttcgtgttcctcccgtataaaaagctcttggtagtctgttctttgccgaagtgaaagcctgactgatcccatatgatgctatgttggtgtggaacttcatgatacttggggaaaccatggtttgtatggtgaatttccaaatatgcttttccgtcaggaccaatcagcgtttcaataagctctccttttgccgtataggtatattttgtttcgcccggctcaccccagaatcgctcatcctctggttttgacggtttgatttctccgccgtaggcgcttcctccgccttttccaattaggtacggctctattgtatcacgattattactggatgtgccgccaattttaaaggcatccaaatcttcacgatggaaacttcgttcatagttcatataccgccaagaactgcgttcgtaatccacatggataatgttgccctgcatttcgggaaacggtgtattataacagataattttttccggatcaatgcgccgcagcatctcgttgtatcctgccatgaaccattctttctggtcgcagcggttgtcatgctctgaggccatataagtggagacagcaacaacgcttcctttttcaatcccttcaaagcagaaatcaaacgtggattcatctccccagttgacagttggaatgacccggagccctttggatgcccagtaagcgccgcaccagcgattacgaaatacattgtaaagttgcataacaggcgccatctccaggtacatactgaaatccggcgacagcaccgcgcggtagcgggagagtttttcaatgtcattgtccgggttcttccagaccctctcaaagcgatagtcatataggaagaagtgtaccatgcggtctaggtgattctggtcctccaaatgggttttgtcaaaaccgatcaacaaaagatcatcgaagtctccgggactttcttggaacttaggaatgatggggatttttaactttcctttgccgggaaactggttgcgaagcagtttctgactggttcggtagttgtaattttcttcggtcatagatagccctcctgtatgtagtaaggaacaagtccttctgcatacaggttcccaaacaaaaaaagttgcacattcctgtgcaacaacatgagaaaatttacaaattggcagtaaaaaatcggagtaccccaaaggatactccgatggtccgagtggcgggatttgaacccacggcctcttggtcccgaaccaagcgcgctaccaactgcgctacacccggatagctgcctctcttccagggcaccaaggccccgcaaagcaacgtagtttattatacggaattttttggccgttgtcaagtgtggaagttgtttcgatccctatctctcaggactgcggccccaaggccgggggcacggtatgcgtgcccccggtttgattgcctcgttggttcaatgcttttttcagtctctcttcctgcccttccggcccagaatcacgatggctgctgcgccagccagagaggccgccagcagtgccagatacagcgccagctgggcagtgtctcccgtgggaacagagtcatccggttcatcagggtgccccggttcgtccggcgtatccggcatatcaggatccgggctttcgtccgggtcaggggtcggatgcggatctggatccggcatgggatcgggacccgggtctggatccggcttggggtctggatctggatccgggtccggcggcggagtcgtgtcgtcataattgatgattagcacttccgccgtgtctccgaacgggaccatcccggggttgtgcccctcgacgcgggtcccatagccgtccacacgcgcctctgccactgtgtagccgacgccggagggcaggcccttggctgtcttgctctccccgtctttcagggtaaatgctgccacgccgtcctggaacgtcatatccccgcagatgccgttgatggacttgtcgtcaagcgtgacggtgaaggagaagtccctctgccggtcaccgctgtacacttgctttttgacggtcaggttcccctttccgttgatgacgttccatccgtccacccgggtgccgtagccatccaccggctcctcctgcacagtgtaggtgtacgcccggccactgtcgtcgtaggcgggccagctgccgaaatcataggtccagctgccgtcggcgttcggggtgacttcccgctcggcaactttggtgccgttctgcaggaggctcagcgtgatggagttcggacggtcgtccgctccatcacccacccaggtcttccgcccctggatggcaatttccgtctccttgccgcccagtgtgttggtcagagccagcgtaccgctccctgtcacagtgtacgactccaggtgttcttcctccacccagtaggtatagggattaccgctgccgtccgtatccggcagatgctcaaaggtgtatgtccagacatcggcgtttccgtcctgggcatttttcgcggacagcgtcacttcgcctgctacttcgccctgggctgccggatccgttctgcggtagagggtcagcttcagcgtctccgggcgaaggccctgcgcgtcactgtcatcccgccaggttttggagaccgggatgtccgtatagcccctgttggtgatggcagtggtgaacgccaccgtagtttccgtcggttctccatgatcgtagatcacttccatgtcctcgtccggggttccctgttcaatggcgtaataatagtatttctggttctggctgtttactttgtccagctctccgaaaatatggcgccagttattggccgcagacagctctgcggtcatgccggcgacctgctccactccatccacgccggtcttccccatcaggttcttgtccgtggtccgccagagttccattgtgatcggatgtttcttggtatccgcggtgtgccatttcttttccactgtcagggatgtcacagctttattggtgaattggaattcagggtaggtcccatccacatcggtcttgttttcctttttcgtatctcccacctggacgtagctgccgctgaccgcttcggtcacgcggtattctgtctcggagtcggagtccggcagatagctgcccggcattcgggctgggaggttctcccagacggctttccactctgcgtactcgtaatagggtttgtccagatcaggatccgtagttccatccagcgtgacggatacagccgtcagggtcttccacgtatacgccgggccctctgccggattctccagcggaaccgcatattgcaggtgcagggtgacctgggcgccctcctcgccggcaggcatccacgtcttgccggcaaagaccttggtggtctgcatgtcgttggccgctgtggtgaggaagccgtcgtcagactgcccgccataggtgtaggccgccgtgtacgcctcgttgtaggaatctctgagcaggacatagctgctcaaatcgactgctccgttcgtcatttgatatcctggctcaagctccacggcgcgataggtgtactccccttccgcattctgtttcggcaggccggaaatcgtcatccctaccggcgattcaaccgtgccctctgtatccgttccggtgagggtcactaccagatcctgcttttgaccgttttcgccggtcacctggacggcttcccatgctgccgcttcccagccaacagatagatccgtggtccgctgaatcaggaaactggtctcccaggtcttgccggcttcgtctgtatccggacgggtgccatagacgttgttccggtcgttcgtccaaatcttctgcacctgcagcgaggtcgtcgccagcttgttggtgatggtggtcgaatttccggattccgtgtaggtgtcttcaattcccgtgaaaaggccgccgctgtctgcaacagtgtatgcgaactcttcaccgcaggtatcgacagtaatcgtcgcggctccgccttgataagcgatttccgtctccaccacgcgataggacagctccgaaatcccgctgtctttttttactacacgcggcaggttctcacaagctccactccaggaatcatagatatgccggttttccaatgtgatcgaaaaaccattgagtattccggcatccttcagtttctcgtacgcgtcttctcccaggttctcctgcgtgaaatagtccgctgccctctgccaacctccgctctttccctccttgacatacagctcaaaggtgacggacatctcgccaaggtccatgtaatcggcagtgatgggctcgccatcgctgcccacccaccgcttggtgaagggggctctggtctccagagagtttttcagctccttcatgtggatggtgtcgccgtctgcggagtcctcacccgctgtcccattgccggtgaagtaatattggtaccgctcatacaacgcttccttcagatcggagttcagctcttccttcacggtgtacacccaccgggcgccgttgggggcccacttttccagctccgtctggggctgcgcggcgggaggcgtctcttcggagggatcctgggaatcggggtctccgatctggtccggatcttccgcaggttctgtcggtgtgaccgggacgctgccggcgccgccatgttccccatccgccggatcgctgtgcaggctggcggcactgagggtctcctcctgcggggcggactggccgtccccgtctcccgcctgggagtccgggttctggtcttcttccccatctgccggaggttccggactctgtgtatccccttcgtccgtgggaggatcggcgggctggtttccctcctccgggggcatttctgtgggcggcgttgtctcctctccctggccggggcccggttcggcgggctcttccgcggagatgccgggctcttctgcatccggatcgtccgcaccccagatctgataagtccactttccggtttctgcatcctgggtccacttgacggtgtagtcctcgccctctgtcagcttctcctcgatgtgcgggtcgccctgccctcctgggcagcggcgcggcgggtcacagtgagccggataacggggaccaatgtaccatctttcccctcttcatagggggcatccggacgcagaccgaaggcgtcgtaaaagtcctcccaggctttttggcccgtgagggtgacgaactctgtctgcacagccttccggctgttcaggaacgtggcgtcggcctcttcccgctcttcatggggcagcagaccgccgacagtatatccgtcccctgtgacgtcttgggcctccaggtcgcccgggccgcaccaggtatcgtagccgcccaggaagctcttgtcctcctccacatgatagaggtacagcgagccgttgggcgcatactgctccaggcctgtaaaggaaagaaccgtttcaacagttgtgctgtctcctcgctgctggtaagccgcctcgacctcctccgaggaccaagtggccgtccgcaccagctcctgcgcggagggctggccgttgttctggatgtagacccggtacagatggaagcgcacggcggggtaggcgatgggcaagtcatctccgcccaaaggcagttccaggatttttttcaccgacagactgccagtcgggctgtggaacacgttctccacctggaaggtgttggagatctcctgtatatcaaacagatccagcgattcctggggtccctcgccggtaccgtccaggggcagcccgttggcgccggtgatgccttcctcccggagaacatattcgtacagcttgccttcctccgtgtatttgggcagccttggctggtcttcagattccggccggacggttccggctccgtcatcgatgatatttttcccctcataaaggagccggaacgtatagttcttcaggccggaccagtcctgaacagtcagggtcgcgatgggggctccgccaaagtcaaacgcctccccgctgccctgcacccgccggtacagtgcgaaggtgacgttgggcaggtccaccgccggatagccagcgggcaggttggtccacagcttccgtccctcaatggcgaccggcttattcaggcggttgacgaaggtaccatttgcgttcagggcatatttggcgtaagaactgctggcatcctgagacactggtgggttgacgccgtccaggttcgtggtctgcgcttcgtaagccgcctccatccccgggtcagcttcgtcacgcgtgcccagacaagtttcacccgtccagtactccgcaatggcgtagtcaaagtcggaggcgtttacactggtgcgctccaccgcggagtaagtgatcttgtaaccccagtcgtcatacttgggcaagttctccagctcggcccgccagaaatactgccggtccgcagatccgttatccccggaggcggtgccgggctcctcacccgcgggatcgcctgctccctcggacggcacctctgtctccggcgggagcaggccctcgtttgtccagcggtagctgggatagatcagttcggtttcgatcccgtcctcagcagcagaggtatgcacagtccggtaaatgtccagatagatgtccggacgactgccggagccatacatatagatgtcgtaccactgcttgtaccagacagcatccgttacgccggtgcgtttgttggtgagggtgatcttctgctcgtcattcttgttttcaccgtcatttaccgtataggatttttcctttacagagcttgtgtatgtagtccacagggcatagacctccggagaaatggtccgcagctgatccagcgtgatctcattgccgccgtccagccagacctcctctacggtatagcgcaccactgtgccgttggtgtcgtacttgggaaggttccagaagtcaagggagttggacttcgtatctgccgtgagaatcggctgaatagaggaaacccgtctttctcttctgtcttgaatctgtacatccccgccgcccaggttcacatagccaaatccatctttctgatagattttaaattgtccttccgtatcatcgctggcggcgatcttcagcttcacggccagagtgaggccgggggtgttctccagggctgcctggagttcccccacgccgtctccgccgccgtcccgccagtccttggtgacggtcaggtccacattgcccagccggcggttggtgacggtgcagaccgtctcacccgcgatcttctcgcggtcgtatgtagcttcataggcatggtttctgccggggacagtgtcgcgggtgattccgggagcgttgatctctccctcggtcggggcgccttcggttccaagaaccgcaatcgctccgattttggtctcccggatgtagacctggtccggcgtaagttctccaatgccggcccatgcgtaccagatgggatctccgtcctcctgggattcgcccagcgtgacggagacaattacctcgtctccatttctgctatacaccgtcacttccactggctcccggtgggcggcgtcgctgtcgtccacccagttcttctggaccaggatccgatggcttcctcccgggccgttggtgacgatggtcgtatagtctccggtgctgctgtcgatggaggtttcataggtggggttcccgttctcctccaggatcaggtattcataccggcgcccctcttcgtcatactccgggaggttctggagcagggctttccaggcctcagaaaactgaatggaaatttcaccgtcgatcgcatctatgaatgcgttttccttcgtgaaatcaacattgacggtcccacctgcatccattgtaaaggtaagaaccttgcatgtttctgtcagagactgttcgccgatggtacggtacagggcgaaggtcaccggcccctcctgggcgccgcttttccacttcttttccaccgtataatctatctggttgctgacggcattggtgatctcggtggtgttgccgttctccacatcggtcacacggtactttgcatctccccggctgccgccgccggacagggtaaacgagttgttgtccagaagatttgttttattctcgccctggtaaaccaccgactccacccagcggtactccagctcccggccctggttgtcgtatttgggcgcgctggcgctgacggacaggccgcccaggttctccgccgtaaattttcccgtttcctccgtccccagcgtctcggtgatctccgtgtcttcccaggggtcctcactgcccaccggccgggcctggagcgtcagctccacccggacatcctccagcgccgactggaaagccgccgctttccagatcttggtcgcattaaccgtcaccgtgccggagagcttgttggaaagggttcccccgttgtagaggtatgtattgttcgtctcccgtgcaaagtctgcatcctcgctggtcagttttttcagcgtaccggaatcctcgtccagcgcccagatgatgtccgtcacgccgccgtcttcccccaccgcgccgaatacctgggtgtagtcccccgcatgctcaccagtgagatactctcggaccacatagatatactcgtagccctccgagtcgtacttgggcagctctgcaaactgaatgtcctgtttctcctgcccgttgagcgggaccgtcagaatgctgcccccatcatcccggacgggcgcggccgttgtgtagctctgcccggctcggtaacgccacagctggagttcacctgccgggcggtgatccggatccgccgcgtcctcccagactttggatgcctgataatccttcacgcccgtgagcgtcaggtacaggctgccgccgtcatagagcttccccacctctgtgcccacgttgggcgtgctggagttgtcgtaggagatctggaagtagtcgccctcgggcagggcacccgccgcgatgccgtcggcggcgtccagccggccgtcgccttttccgtctccctccctggtctcctctaccgagtagttgatccggctgccgtccaggttgtacttccacagaccgctgacggtgacggtgccgctggtggggttgtccgggtctccatcagggtcctcttctatcttcatctgatccttcatctctgccagcagccggcggagggagcttgccgtatagttggtgtccaccacgaagtcaaagctgttgtaaatggcttctgcgatgccttccgcgccgcccagattaccccagcggagctgaacgcggaagttgaattcgtcctccagcacatagtaccagccgtagttgtccccggcggagggatattccgacacattgccgttgttgacctctaccgggctgtagccgtcaaccccttcggacggtcccatgatccactctacacgggattctgttgaggtctccccgccgtagccatcggatgttgtggtttcgatcgcttccggcaacacgccggtcgggacggagaccgtataggtgttgttcccgttgtcggccaccgtcattttcggcatagcggacaggcccaccccggagagcgtcgagtcctccccgcctttcagctcaatccattccccgttgtcgatccggaaccacagcgacggctgatacgtattcgccccgggacgcactccgtcctcattgttgttatccacccagtagagcgtgttctcttcaaatgccccggcggcataccagcttgtcaccgtcaccaccgtatctgcgtaaatcacaggcaccagggtcagacacagtaccagtgccagcagcccgctgaccagccgccggcctcccttcttcggaaactttccctttgggagccgcccccgctcccggactctcttgcctcgatacagcataacccctcacctcattgaaaaattgttcacacacatatccagtgcgtccctatcgtccacgcccctgctgcgtcggctgggcaggactcagctgccctgctcccagcccacagtcagctgctcctcttccagcatccgctcgtgggcctgctcggccagtatctgtacactgtcccgaatgcgttcctgcgtgacctgatacagcctgcgcagacagcgggggttgctcttgtccccatccacccgggcatccctgcacagagtccggatctctccgctcacctgggtcctccgcatggggcggccgcttcgggtgacgaataccggccccgcagtgatccccacccgccggagatagactgccaactccttctgcagacaggcaggaatcaggacgtactgcgctctgccgtcacaggcggtcagaacacgtccctcctccaccgcccggaccatcacccggttcagctcacttacgcggatccctgtcagggcaaagaccttcaccatcagatacgtacgctcccggcccagattccgggctgtggccagcaggcgcagatactcagtccggctcaactccggctggatctcctcttcggtgtccagctggccgatcagctgcagatcccgccgccccagataggccagcagcccattggcggcggacacatgggtgttggctgtaccgggcgagtagccttcccgcagcaaggcggcgcgccagagctccagtgtgtctgcagccacccgcttgtcctccggaagaaagtggtaaaacgcctccagcttggggcggtagacctggatcgtctcccgccggcggccccgggccgccaagctgtccagataccggcagacttcttcccaggtaactgtcagctccgccggcgccgcggtcctgtcctgtagtgccgtttccatcgcctcacgcattgggcattctctcctctccaaagccgctttcactgtctgaatgctttccaaatatctcctccgtatccatctctttccgatttacaacagaacaatgattctgttgtaaacctgtcatcagctggaaatacggtgccagagcacgaagagtcggttttggccgaaacggcacctttcccttttgggccgcaaaattggaatcctcaaaaaatccaaaccgcaaaaaaaggacgttgcttttgtagtttttttgttttatactaactatattccaatgtatgtagtggagagagctttgtcgatttacaacagaatcattgttttgttgttaaacgatcagccgcattttttccagaatctgttcatgggccctggcgctcactgccacataaatccgggttgtctcaatggaggaatggcccagaaggtccgccagatgcgccagatccttctcctgttcataaaagcacttggcgaacaggtgccgcagattgtgcgggaataccttttccggcatcacgccggcctcccggcagagggttttcatttcatgccagatgttgctgcggtccaggggccgcccggtgcgggtgcggaacaggggcccctcctggatatcctgcgccctggcataccgccgcaggcgttccgccagttcctgcggcagcaggacggtccggcactttcccttcagccggatctccgtccggccagcacgcagggcctccgccgtgatgaagcgcagttcgctcacccggataccggtggcgcagatcgtcagcatcacgtggtacagccgctggttcttgcgccccttggcaatagagagcagccggcggtactccgactccgtcaggtcccgctgctcctcccgaaacgcccgccgctgaaccttcagcaacttcacctcgcagtgctccgctccacagaaccgcagatacgcgttcacagcagagagcttgttgttgaccgtcagagccctgtactgctgctgcaggcgctcccggtatgccagaacacccgccttggtcaccggggcgccgcacagagccagtcgcagctgttccgcctcctgcacgtatttttccactgtggcacgggctttctcgttttccaccagaaattcccggaacgcggagatagactgtcctgtgagcgtgatttcttccatcttgactcctcccaaatccgcccgcacagacgcgggtattttttgtaagcatacccaaaatggcgtcggatatgttccgcctatggagatgctttccaaaaaagttccgaattgcgcaaaaaggcagcccgcggagaatccctccgcgggctgccttacagtatgctgttgttttttatcggcctccccagacccggtagagctcgcttccccgttcccgcaggcgctcgttcagccaggagcgcagggatgccatgccctcctctgtccaggggaaggtctccgtctcaatgtgctgggccttttcaaagcagatgttctcatagacccaggcctggacggtgccatcgttcacctttcccgtccgctggaagcggtagcggaaggtgccgagggagccgggaaaaatctccgacttcttcagaaagttcagggtcaaaaatgcgaatggatcttccatcgggcagtttctctcctccatcaggccgcctccgtctcccggcggcagaccttgatccccgcgatggtcagcgcgaacacgaaccagaaaatgcacatcacccggggatagttccacaggtaatccgccagaccgcacaccatggcgccgcacagagccgccgctccggcacaggtgatggtgcgggcggcagagggggcgcagtgccggaccgtgcgggccgcctttttgatgttccacagcatggagcccacaaagcccagaaaccccagcagtcccgcctcgatccatacctgcaggtagaagttgtgggcgtgaacgaagggcgcttctgcgtggtagaggttgaagtcgctgatgtagtcctgcacggcggcggtgcccagacccgcgccggagacgggagacgtccggatgacctccagtgccgcctgatacaaggggatgcggctggcagtggaggtatccgccggattgaagatcgtcaggacccggtgccagatggtgtccggcaggaaagggaccatcaccacgcacagcaccgcgaaggcggggatcagcttgggcttccacaaaaacaccagcaccaccatggcacaggccatgccaacccagctggcccgggagtaggtcatgcccagagccagcacacccacggcaaacacgccgcaggccgtcacgcgggagatgccccgcttggagcagaggatcagcgccagtaccaggggcagcaggaggatcagcacctctgcaaaggtgttggggttgtcgaaataggactccacccggccgggcataccggcgttgacctccaggtccacataggactcgttgacctccacgccctggatccgttggtacacaccgtacagcgaggacaccagcacacagaccccaccgccggcggccagccgcttcaaatcctctgtgccccggacagcgctgaccgtcaccagcacgcacagcgctgcggagatatggtagagcaggaagcggaaggaggcggagggctcataggagaacagcaccgccaggaacatggctccgaacagcaccaccggatagaacccgatgtgcttcacgtccagccggaagtcccgccgggacatggccccggcatagaacagcaccagcagggcggcaaagcccagcatactatatgcgttgttccaatgcgagaagggaatcacccacaatagcatgatgagccaggattgggcgacggcggtctcatgtcccatctcaaaggccagacgggagaaaacgctgtcatcaaacgtagcccgcagggcaaggtacagcttgtggagcagccaggcaggcaggttgatgaggcccgtcagcagccggcagaggatgctctcctcccaggcccgggccgcaacgccctcccggcacaagacccggagaacacggctctcgtcgatctggcggttgcaccaggcgcccatgcgcaccaggcagcggtggacggcgctgtcatagtagacggtgcacagcaccgcccataggtgatacagatagctttcgcggagaatgctcatgcagggaaacctcgtttcttcagatgcggtttttgatccggtacagctgggagagcagccagaagcggcccccccgcaccagctttgctgccaactgcttgttgcggctcatgccggcgggcgacagcgtccggatggcgtgggccatatccggccgcgcacacagggcctggatggtctcctgccgctgccggagggtcttgggattgcccggggcgtactcgttgccgatggcgatcaacagcccggcccagttggagttctcccgccactgggggcggccgggcgtcaggccgtaccgggcggccaagtcctccttccgctccatgaagcggccgaagacctgctggaagtccttcatatacttgtgggtggcggaggccggattctggagatagcggtacaggggcgtctccgtcaccgccaggcgccgggcgttgcagaaatactccatcaggaacagctcgtcttccagataggcgccctcatagcggagatggagtctgtcaaaaatctctgcggagaacagatagcgccagatgaatccattgaacaccggctgggccagccggtcccccagcaggggattgacgattttctcccggatagcgtcggcgtcgtagatcccggcgggcagcaccggctccggcgtctcgctgccatcaggccacaggttcaggtgcgcacaggcggcggtatccgccccggcccgctcccgcaggttccacagcgtctccaggcactggggctcgtactgatcgtcggagtccagaaaggcgatataggtcccccggacatggtcaaggcccacattccgggtctcgctgacgccgctgttgcgctccttgtggaacacccggatgcggtcatcctcccgggccagctcatcgcagagagccggggagccgtcggtgcagccgtcatccaccagcagcagctcccagtcggaaaaggtctgccgccgtacgctctccacgcagtctctgagaaatttctccgcctgatagacaggcacaatgacggaaatgctgggcatagacagcctccttgcgccctccggcgcctctcttcagtctgcggcgcggaaactccggcgccctccccccagaatctggggctcttacacggagctattgtacccgatttccccgggaaggtcaacgtcttttcccggaaaagccgggcatactaggagcgaggtgatccaatatgaacgatatcgagctgctccaatacgtccatgagacggcggagatgggcattgaggggctgaacagcctggacgggcaggtccgggatgacagcctgcggcgggttctgagccagcagggcgccgagtaccgccagatcgcggatcaggcggagcgcctgctccggtctctgggagaggagcccagggacccaggccttctggccaaggtgtccgcagaggtcatgtccactttcaaaacgctggcagacccctctgcatccaacatcgcggagatggtcattcagggaaacaccatgggggccaccaaaagtacccggcatctgggggactacgccggtggaaaccgcgagatccgaaatctcgcggagcggctgctgcacaccgaggaagccaacgccgcccagatgaagcagttcctgtaacacacccggcgcaaagcagaggaggagcctcctacgggaggctcctcctctgttcaaaggaccggcagcagatcttccccattcagaaaacgctcctccgcctcctggatagggatctgccgctgattcagtctgcgcaccagctgctctacctctgcctgttcccttcccggcagcaggaccaccagatgtcgctccggttcccaggattcgccgctgaatccgaatcgccgggggtgccgggtctccagaacctgatagcgcacctgcggccgcaccgccttgcgccggcgccagatcgacaaggccagcacccggaccagatccttcggcgtgggcttttcccgcagcacgcgttgaaagagcttctgcagctccgcccggtctccgcagtcccagatgtcctccgccgcccgggagagggcctttgccagggtgtccttttccttttcactgtatctctgcgcctccggatacagcgtctccatggagaaggtgcccggcatacgggggatggcagccttgaccaggcagcacaggtcgtaatagcagtcccggctcagtttcccactgattttttccactgtccgcaggatatcttcatccatccgaaaccgtctcctctcctcttcaattcatacatagcatatcaaaaatcgcaggtttttgaaatagattcgacacattcggactcttttagacaaattacggcaccccggacttgacaatccggaggaaatgtgctcttctacccgtatcagagacagggaggcgcaggcatggatattcgcagaatcgagtcgggcaagcgggactttctccccctcctgctgctgggagacgaacaggaggacatgatcgaccgctatctggaccgcggaacgctgttggcgctgtacgacggcggacttcgcgccgtgtgcgtggtgaccaaggaggcgccgggcgtgttcgagatcaaaaatctggccgtggagccggcctttcagcgccagggctacggccgggccatggttcggcatgtggccggcgcctgccggaccgccggagggacacgcctcctggtgggcaccggggacagtgccctcaccctccccttctaccgggcctgcgggttccgggaaagccaccgggtccccaatttcttccttcaattttacgaccaccccatatacgaaggggggcggcttttgtcggacatggtatatttgtccatggagctttgagcggaaaaggcggcgctgctgaaaatcagcggcgccgcctgtatcataccgtttgattcagttttgaaaaaggcttcacgcctctgcggcggccttcagagcctccgtgcggtcagttttctcccaggtcacgcccaggtcctcccggcccatgtggccgtaggccgccagcttgcggtagatgggcttgcgcaggtccaggtcccggatgatggccgtgggccgcaggtcaaacaccttgcggacggcagtctccagcctgtcgtctcccaccgtaccggtgccgaaagtgtccaccagcacactcaccggctgggccacgccgatggcgtaggccaactgcacctggcagcggcgggcaaggcccgcggccacgatgttcttggccacgtaccgggcggcgtaggccgcggagcggtccaccttagtgggatccttgccggaaaagcagccgccgccgtggggggcgctgccgccgtaggtatccacgatgatcttccggccggtgaggccggaatccgccgccgggccgcccttgacgaaacggccggtggggttcacgtaatactttgtgttctcgtccagcatgtccgcggggatcacggccttggccacctgctcgatcatgtccttccggatctgctccagggagacgtcggggtcgtgctgggtggagatgaccaccgtatccacccggacagggcggttgtgctcgtcatactccacggtgacctggctcttgccgtcgggccgcatatagggcacctggccgctcttgcggacctccgccatgcgcttgcacagcttctgtgccagggacaggggcaggggcatcagttccggcgtctcgtcgcaggcgtagccgaacatcatgccctggtcaccggcgccgttgctcagctcgctgtcggtgccctccttgttctccaaggatttgtccacgcccatggcgatgtcggcggactgctcgtcgatggaggtaaccacggcacaggtgtcgcagtcaaagccgtacttgccccggtcatagccaatgtcccggaccacctcccgggcgatgtgggcgatgtccacatagcagctggtggtgatctcgcccatcacgtggatcaatccggtgcaggccgtggtctcgcaggccacgcggccgttggggtcctgctccagaatggcgtccaggacggcgtcggagatctggtcgcagaccttgtcggggtggccctccgttacggactcggaggtgaagagatagtgtcttgccatagtacaggttcctttctgagcactgacctcatcaaggggcgaaaaaaatgtgcgtttcgacggcgaaacgcacaaacggattggttgcttgctcctcatctgtcgatcaccgccggatttggcaccttgtcataagcaggttgccgtgggttcatcgggccgttccctccgccactcttgataagggtaataaaattgtccctattatcttatcaggtttttcccgtttgtcaatacggtttttccggttttgcggagaaatccgtcgccccgtcggaaaactgcgcagatgttccgcctgttcaaaaattatacatgacttttttcctctgatcgggtataatggatatcgcttgtatatttgaaatgttctggagggcttcaccgtgagaaaactctgcgacagcgtggaccgcttttgcctgcagcatccccgcttcggcattccgaacctgatgaagtttctggtggggatcatggccgtggtatttgtgctggacctgttctccaatggctatgccagctatatgctgtacttcaacgcagagctcgttctgcagggagagctgtggcggctggtcacctggatgttcctgcccaccaacggctctctgttctggatcttcatcagcctgtccttctactacttcatcggcacctccattgaggagtactggggcaccgccaagttcaccctgttctatctggcctgcgccgtgctgatggtggtattcggcatgatcagcatactgtggtccccgcttcccgttgtcagcagcggcaatctcaaccagatcctgttcctggcctttgctaccctgtaccctgacgcgctgatccgcgtctatctgatcctgccagtcaaggccaagtggctggcggcgttgtatgtgctgctgaccctgtatgacctgctccgttccggtatgtgggcggcgctgttcacactgccccagctgctggccgtctggctggtgtatctggtgttcttctgggacaggatcggggaccttctgcgggagttcggctttgccgtccgccatcagaactcccaccagaccatccagttcaagtccgcagtgaagcagcagcggaagaaggcccagcagcagggctaccgccacaagtgcgaggtctgcggccgcacagatacggactttccggacctgcagttccgctattgctccaagtgcgcgggctaccactgcttctgtgaggaccacatcttcaaccacacacattttacgcagtgagcgtttccgcggtctccgcccatcggggcggggaccgcttttttgacacggcccctgagatttctcttccttccggcccacaaatgcggtatactgaaaaaaacgacaccagaggaaaagggagacgatacccatggaacgacaactgggaaagcccctgcatattcaggcggcggaggcctttgaatcgcccgcgtttcttcagaagctgggaatggcccgcgccgacgcggagcgtatcttcggcggcgccgactggcaccagctgctccgggatctagtgcccatccggggccggatctcctgcgccgacgccctggcggccttccgccccctgctggaccaggtggcgccggatcccgctgagggatggctgtcctacgcctaccaggtggcccgggcgctgctgtatccggcgtcggaccccggacatacctccgcccagtgggatggagcgctgtgctttctgcagctgctccaggtcctgtttgacgcggagcggacctgcctgccctttgacttctggctggactttgaattctgcacggaggaggaactctcccacagcggtgtggcggaggagtaccgccgcttctgctaccggttccgggaggaatacatctatgagatgctccgcctgagccgggaggtcacatccttccgcaccctggagcacatcgccggcgtccactatgtgtccatgcgggtggcccgggccttctgcgcctccggcggactcatcgacctggggctgatctccggagccgccctgggccacgacctgggcaaattcggctgcaagcccggggaacgggtgccctacctgcactattactacaccgaccagtggttcacccgccggggactaacggccctgggccacatcgcggccaaccactccgtctgggatttggagatcgagaacctgtcctcggagtccctgacgctggtgtacgcggacttccgggtgaagcagacctatggggaagaccgccgggagatcccctgcctctactccctgcaggaggcctttgacgtcatcctcagcaagctggacaatgtggacgatgccaagcgcctgcgctaccgctatgtctacgccaagctgcgggactttgaggactatctcatctcctttggggtggacaccaccctccgcaccgccggcggccccgcccgcccggccaaaaatgctgccctgctgaacacggacgaggtggtgaccgctctgcggcgtaccgccgtggaccacaatatccgcctgatgcaccggctgggccatgagcagctcttcggcaacactctggaggccgcccggggcgaaaagaaccccgcccggctccaggcatacgtctccatttttgaggagtatttcacctactggaacgcctctcagaagcagcagaccctggactttctgtatgagctgctgctgatcccggacggagacatccgccgccgggccgccgccctcatcggacgcatcctggccgccttccgcctgggctatcagaaggagcccccggccgacgccccgccggacccggaggaagacctgcccttccagctgtgggcggagtacctggaaaagctcatcgacccggaccggcggctgacgccccggcagatcagcatgatccgctatcaggccaagactgcggcggacgcgctgctgatgaactgctccgacgccgacgccccccgctttgccggggagctgttccgccactaccgccgcccggaactggtggacgccgatgcggcctttgccctgctggacacggtgctgagcctgccgctggaccgggtatccgccgaggatctgcacgtgctgaccggcttttccgtctggtggctggaacggggcggcctgccccagaaggccgccgccctgcggctgttccaccacctgctgacggccctggaccccaatggccgggacgccgcggccatcactgccgccgtggaggcagcggattgccagggaagcacgccgctgctgtttctccaggcccgcctgggagagcggctgggcctggatgtctccatccagcggtccctgttggaccggcaggacgttgtgagcaatgtgtttctggacaacctgaagactgcgacccactgggttctgaaggccgtgggcgtggagtacctgctgggtcaggtggaacagggagaccgcgccaacgtgctccacatcgccacccacttctccaacctgatgaaggtcagtgagaatatcgtggtccgccggctggcgggcgcttccctgctggccattgctccggccctgacgccggaccgccggaacgaggtggccgtggagctttccaaggtgctggagaccgggcagacggagatctcccagtacatcccccagtacctgggccagtttgccctgtggctgacgcccagggaactggacgagatcgtggatcagatgcagatcctcctctcctccgccaacaccgtggtggtggccgccgccctggccactgtgggcgccatgctggagcattatgccatatacgcccagcggttccacgagtcccgggaggtactggaacgccgctggcggcggctggcaggcctgctgttgaagggcctggcctcttatcgtcagagcgtgcggcaggaggcgctgcagatcctgggcgagcggctcttcgcctcacagaccctctcctacgagggaaggctgccctcttcaccctgatggccaagaagatcctcttcctgctgggagagcagccggaacaggagctgagcttcttctacaccgccgccgccctctcccacatctaccgcttcatcgtctcctatcagattgaaagcggagacttcccattctacatgccgggaagggccgccttctttcccggcaccttcgaccccttctccctgagccataagggcatcgtccaggagatccgggacctggggatggaggtgtatctggccatcgacgagttctcctggtccaagaaggcgcagccctccctggtgcggaggcagatcgtcagcatgtccgtggcggacgagttcgacgtgtacctcttcccccacgacatcccagtgaacctggccacgccggaggacctggaccggctgcgggaggtcttttccggccgggagctgtacctggcggtgggctcggacgtggtagccaacgcctcctcctacaaggcggcaccggtgccggggtccgtccactccatgaaccacatcgtcttccgccgctccagcgacgcggagggacgggagatcgacgcagatctgggctgcatctccggccgcatcatccagctgcagctgcccacccatctggaagacatcagctccacccgcatccgggagaacatcgacctgggacgggacatctccaccctcattgacccggtggtacaggacttcatctaccgcaacagcctctatctccgggagccccagtacaagcggatcctccgggcgggggatctggagttctcccacatctcccagccggaccggcacctgtgggaggagttgacggaggtaccgcttcaggggcgggagcagccgccggagatcgaccccagggacggcctctgcatcctgcgggacgcgggatcccgcccccgggtgctgggttttctgaccctgcggaccgtgaactccggcgggctgtatgaggccctgggggacacggagctggcggactatgtccgcaagcacacggcggggcgggttcagctgctcaccggactttacaccgcccgcggctccagcggcagctatgatgtgggccagctgctgatgacagaggccctctcccgctccctgggagcggactgcagctatgccgtgtggcacgccactgcgtcggaggagacgctggacctgctggagaggcaaggctttgtcccggcggagctgcccagcgcaaagcccctgctgctggtggatatgcgctctccctccgtactgctgcagaacatccccaccacgctgaaggagcctttctcctccgaccgtaccgtgctggcggcggtccgcgccgcccactgccggatgcagcgggctctcaccggcctgtatccgggttctctgatcctgtccctgaacgcggaggtcatttaccaccgtctggtgcggaagatcgtggacctgaacggcgtcccggcggagcccacagtgccccgggtactgggtcccaagatgtgcgtacccttcggcaagatcctgcggggcaatgccatccccaacaccgtcaccaagaccatccacaccgacaaggtctttgccagggacctcacctccttcgacatcgagaatttccccggctacgcgccgctggagagccagatccgcaccatccactccttccgccggccggtgatcctggtggacgacctgctccactccggcaaccggatccgggcgctggatcccctcttccggcaggagggtgtggtcatcgaccgggtgctggtgggcctgctgtccggccgcggacgggatctgatggccgccaagggccgcagtgtggacagcgtctatttcattccgaatatgcgttcttggtttgtggagtccaccatgtaccccttcatcggcggcgacactgtggggcatgaggagccctccgtccccggcctgaccccagcggtgaacctgatcctgccctacgccttcccccgcttctaccgggagtgcggacgggaggcggtgttccgtttctcctgtgcctgcctggagaacgcccgggacatcctgctggccctggagaccaccttccgggagcggtacgcccgcaacctcaccctctcccgcctcagtgaggcggtgatcctgcccctctccccggacaagggcagctgtatgcactatgaccccagtcttcctgcctccgtatttctgcagaacgacctggagatgctgttgcggatgcggaacgtcctccaatcctgaccgcgggcctggcgcgccatccaggcgaaaggagcccttatgtattactaccgccacggggaggtcatcttcgcctctctgctgccggacctccccctggagccggcgaagcgtccctccgcagggacgcccagcctcttcctcatcgaccgggacccgattcgcagccggtcctccttctgcgtctcagacccccggcagctcactgcggagacggaggatgtgacctggctagacccctcccggatgggcgttccggtcccctccctgcccaaacgcctccagcacaccatcgacgcccggctgctgcgggcggttaacatccgccacccccgctgggctgactttaccaaggcgtccgccatgcatctgccaagccgcctgcgggtgaatctgctggcggtaggagatgtgggcagcacccttttgacggcgctgaagctcctgggaggcgactgtattgagagcatcggtatctgcgacctgaatcagaagactgtggcccgctgggtcacggagatggagcaggtatcctggccctgggactacgacgctcttccggcagtggagccggtagcggccggggacttgttccgctgtgatgtgttcctcttcgccgccactcgcggcgttcctccggtgggaggcggtgtccgggacgtgcggatggcccagttcggcgccaaccggccgctggtggaggactacgcccggcaggcccggcaggcgggattccggggactctttattgtactgtccgacccggtggatcccctgtgcaaggcggcgtatctggcctccaaccagggtcccgacggccagtgggacgggcaggggcttcgggcggaacagatccagggcttcggactgggggtcatgaacgcccgtgcggcctattttgccaagcaggatccccggttccgcagcttcctgctggatggccgcagctatggccctcatggtcaggggctggtgatcgccaactccctctcccattatgatgacggcctctcccgggagctgacggagctggtggccaccgccaatctgcggatccgggagctgggcttcaagccctatgtggcccctgccatttcctccggcgccatgcagctgctgctgacgctccgccggagctggcattgcagctcggtggctctggggggatctggttcggcgtccgcaaccgtttaaccgccgccggtctggaaatcgagactgcctctttgcccacaccgctgttcgagcggctgcgggaaacccagacgcttctgcgggagatcatttagcgggcggctgccgctgcgtttcatcataccggccgctgcacgccgctttgccccgcgcaccgggcgggtgctcggccggaatgcagccggatgcaggaaggagatgatcggcatatctgaagaactgacggtgatccgccccggcggggcgctctccccccggtgcgccggagtgctggaggcggccctggtggggcggcaggcagaggtgctatcccgcctggagggtccgctgacgggacggcggctcctgtttgtcgtctccctggatgagggcggcgtgaaccgcgggttctatgacctgctggcccatctccgcacccatccaaactgcctggaccgctgcgtggggagcgtgctggtggacgcccccggcgatctgtacaccaaggcagcgggccgggacctggtgctggccgccaaccttgcgggctgcgcctttgtgggtcgccctctggtggaaggcactggcgatctgcggaacttcacggtccaggcccgaaacgctggctgttctttggaagcggcctaccatctggcgacggcggatctggtggagcgggtgctggccttctcccgcccccggctggagcggccgaagctgctggccctccacgcctccagccgggccacctccaacaccctggccctgtgggggctggtgcggacccggctggaggaacgctgtgacatcacggagatctgcctgcggaacggcacgctggaggactgtgccggctgcccctacaccacctgcctccacttcggagaacagggcgggtgcttctacggcggcgtcatggtccaggaggtctaccccgccatccgggaggcggacgcgctggtgctgctgtgccccaattacaacgacgctctgtccgccaacctgacggcagccatcaaccggctgacggccctgtaccgcaccacctcctttgcggacaaggcggtgttcgccatcgtggtgtccggctactccggcggtgacatcgtggcctgtcaggcggcgggagccatgaacatgaacaagggcttctggctgccggcgaacttctgcctgctggagaccgccaacgacaagggcgaggccctggccctgccggggattcaggaccgggcggatcggttcgcggagaatatgttatgtcagcttgcatactagaagaaggcacgcctttcggcgtgccttcttctcagccgtagccgctgtatgtacaacattcgatgtcgaactccgccgcaattcttccttccgcgtcataggcaatcatgaccggatagcaaaccgcttccggcgactgttccaatggcaggggctccataatccagaaaaatgtccggtcccgtccggtgacaaagtcctcctgctccacggtcaagcggcgaagctcactgcgtaccgcttttccctggtcgtactcctcctgctgaatgctgatcaccactgtctcgattgcggggtcattgatctgtccaaaatagcagcccagtaccttgtcatcatggctgatctgatgatagcccgcatatatgggttcctcgccggtgcagtccaccgtagctccgaacatcgtctcccagcccagcggactgagatgggtatctcccagcatcacagcgcgctcgttttccatcaggtagaaaagatgtgttttatagagcgacggctcccacttccgctcaacgacccaggccctgccgatcccctcatgttccgcctcccgccggacagcctgaatcgggagcagggcgataccaaaaatatgatccacaagcagcaaactcaccagtgccagcagcacccgccacagggcctgccgtttccgggagggcagctttttccgtctcataatccctcctgttccggcaggggcagttccagacggatctgctcgtcaaatgcctcaaagcgcagtacgacgtatgtatcctccggggagaggcgcacatagcaggagccatattctaccctccagtttccccgtccgcttcccttcggagggtctctccttcctcccggcgtttccagccaggtttgctccatcagccgtctggacacaatgccgccgggaattcgatcatacgcacacagctgaacttccgcctcccacacacctggggtatcatccgcctgccctatgctgatccggtaaacccgcaggatgtcgtttccaactggaatgcggatatccaaccgctccgttgctgccacagcggtatatgcagacggttcattcggataaatacgggcggagatgctatcaataaccatccccaatattcccagggccagcagagcctgagcgcacagcaccactgtcagcaccaccgccgcccggctcaccagcacccagccccagccggtgtattgcctgttcagctcccgtcccacctcatctggctctcccatggcggcgatggcccgctcttctgccagctcctcgtcataccccagctcccgcagggcctccatgtggtcctcgatgtggccgtccagctccgaccgaatggcctcccgctccttctccgtcacacggcgcagggacgaaagcacccggtccgtataatcccgcctgtccatatcatgccgggtccagccccggacaggcctggagcaccgcattcaccgcgccggagtaggtctgccaggcggcagcctcctcccgcagcaccgccgccccccggcgggtaaggcggtagtatttccgcatccggccggtgggggcctcctgctgatacgcctccaccgccccgtcccgctccaggccgtggagcaccgggtacagcgtcccctccttcatctcaaaggtgtggtcggatctgcgggccagctccacgatcatctggtaaccgtacatatcctcccccgccagcagggacagcaccagcagctgggcgtggtccatggtctgcttttttgccatcgggcacctcctgtccaggcaacatacctagaattactatgcctttagtatacatagtaattctaggtatgtcaattacaaaaaacgcgcgcctgcccggcgcgcgcttttttcctcaattcttcccgatccccagcagatcccggccatggctgttcaaatgcggcgccagctgctcgtaggacagccggaactcctgcggccccatggcgtaacaggcaatctcatagggggagaaggccactgtcatcccctcctcattgaaggagaccgcgtagctgctccagtttgcggcaatgtcctgatagtcctcccagtagccggcctccacggcggcttccggcgtcatgtcgatctggcggatgatctcgtcccggaccgcgtccagaaatatctgcccgtccgctgccagaatctcaggcgcgaagaactggcccgtcatcaggtcgaagttccaggccagcagtaccgtgttggggtgggccccgccggtatagctgtaatactccgcctggatgcacaccatctgctccgtctgatagacagaacagtccagctccagcgtgtagggtgtccaattcccaccggactccgtccgaaaggccagctcctcctctgcccaagccgtcacctcgtcaaagccatccgccccggcccagtcgcggaaccggctgttgaaggcctccgccctctccagggccgccgtctccgccggggaggccgcctccgtcagcacagtgccgtccggcagggtcacggtcatctccggaagctcataggagcgcacagccaaagtcgtgccgtccgccgccgcggcgctgtcctccagcgtcttcagaaccaccgtgtaggtcaagggctcggatgcagcctgagtgaaggtggccgcgcccgtcatcgtgccgctgtccggctgcttctgttccgggacggcaatctcctgcgatgcagccgtgggctcctccgtctccggaacgggggctgcgcaggctgtcagcatacacagcagcaaaagcagggcgatcatccgtttcataggggttgctcctttcctcagcagggcgcaggccctcctaagatcacgggaccttccctccactccgtgccgccggcggcggagaggcggggatacgccagggtatacaggtccgtggcgcggacctccagttcaaacaggcgccgggcctccgggcccaaccgccggacctgcgccggcctggtcaacaccggcacggctgccgcctcccgcatccgggagagcagtcggcaaccggtcccattggccgccagcacccgcagatagggcacccgctccggcatatcgccgggcgtcagtcccaggtaggcccacagcaccatccgccgcaggcgggccatggcgtaacgcttcgtcttggctgcggccagcagttcgggcagcgaggcggcagcgcgggaggcgtcgtacagtcgattccaaatgccctcccgcccctggtccagggcggcaaagtccgccgccgtcatggaccgcagccgggccagaatggcccggtgactgttctcccagaacaccggggcccggccggcggcctcttccagctcataagcgcgggccatggccggaggcagcagggacagggcctcctcccgtttcccctgccgcagcagcgcccggaggccggaggccgaggggtgggtgtccggcgccagggcgccgtcgtgggcgctgccctccctccggatggtcaccggccggaggggggcgttctgccccagcagggccttgcagtactcgatgcccaaaatgttgttgggagactccagcagggcggcgtcctcctccggcagcaggccggtcagcgcccgctgccgggcagcggcaaagctcaccgctccaggcagcacctctcggagccggtctcggaaggacggcgccagcagcgcggcggccacccgctccagggcggagacatcgccgcactcactgccgaacagcaggtgctccacaaccccggtggccgccagcgcctggacgcctccggcggcaaatccttccgccgaggacaccgcccagggcaggggcagctccagcaccaggtccgcgccgctctccacggcagccctggcccgggcgtgtttgcgcagcagggcgaagtccccccgctgcacgaagttcccgctcatcacgcagaccatggccgtgtccggtcccagcgccgcccggcctgcctccagaagccgcaggtgcccgctgtggagcggattgtattctacgattatacctgcggcccccatggatttctccccttccaaatgacaaaaaagttacagtccggtgtcagtctcgtcaattttttatcaataccgcccgcatggggctttttttcgatcataccatactttccggaaaacgtccagccggaccgattccgggctgctctgcggcgagcagacgccgctgcgccggaacttccccggcaaaaaagcgccggttcgttcaaaattccggttgtaaccggggaaatctctggtataatgagaagtgcgccgggacccgccccgccggggtacgggttccctttcagccaggcatctgcctgcaattcatacgatgtggggatgtccacgggcatttccaaaaaagaggagacggtaaacatgaacattctggttatcaacgctggcagctcttccttgaagtatcagctgctgaatcccgagaccggcgccctgctggccaagggcctgtgcgaacggatcggcatcgacggcaagttcacctacaagccccaggtggagggcaagcaggtgctggacgccgtcgatgtggccatgcccacccactccgaggccatccaggccgtgctgaacgctctggtggacaaggacaacggcgtcatcggctccatgcaggagatcgatgcggtgggccaccgggtggtccatggcggcgaggcctttgccggctctgtgctcatcaccgatgaggtcatgaaggccctggaggagtgcatccccctggcccccctccacaaccccgccaacatcaccggcatcaacgcctgcaccgccgtcatgggcaaggacgtgccccaggtggccgtgttcgacaccgccttccaccagacgatgcccgccaaggcctatatgtacgccctgccctatgaatactatgagaaggacaaggttcgccgctacggcttccacggcacctcccacaagtatgtctccggccgggctgccgccatgctgggcaagaagcccgaggagctgaagctgatctcctgccacctgggcaacggctcctccatcgccgctgtggacggcggcaagagcgtggacacctccatgggcttcactcccctggccggcctgcccatgggcacccgctccggcgacctggacgccggcatcctgcagtacctgatgaacaagtacggcatgaacatcgacgagatgctgaacatcctcaacaagaagtccggcgtagagggtctgtccggcgtcagctccgacttccgtgacctggagaaggcagctgaagagggcaacgcacgggcccagctggcggaggagaagttcgcctacgaggtgaagaagtacgtgggcgcttacgccgccgccatgggcggggtggacgccattatcttcaccgccggcgtgggcgagaacgacaagggcatccgcgccatggtgtgcgacggcctggagtatatgggcgtgaagctggatcccgccgccaacgacgtccgcggcaaggagaccgtcatctccgccgccgactccaaggtgaaggtcctgctgatccccaccaatgaagagctgatgatcgccaccgacacggccgccatcgtcaagggcaactaaattccgcatctccgcatattcagagagggcaggccgcaggcctgccctctgttcttttgcaaacatcccgtttcggaagcagggatcctgggaaagcgcgaggggagcagcgtccgccccgaatgggcgcaaatgccccgcaaagccttgcccccggcacagcggtatgctatactcaaaacacacccagcggaaatcttcgaaacgaggtgatcatgtatgcgggatctgcgggagtcctgccggatcgcggtggtccaggccgccccagtgatgtttgacaaagccgcctgcaccgtgaaggcggtggagctgatccgggccgcggctgcggagcgggcggagctgatcgtgttcccggagctgttcatccccggctatccctacggcatgactttcggcttcaccgtgggcagccggaccgccccgggccggaaggactgggggctgtactacgacaactccatcctggtgcctgggccggagacagagatcctgggccgggccgcccgggaggctcgggcctacgtgagtatcggcgtgtccgagcgggacgccgtcaacgccacgctgtacaataccaacctgatcttttccccggcgggcgaactgctcaccgtccaccggaagctgaagcccaccggcgcggagcgggtggtgtggggtgacgcggaccggcattacttcccggtggcgcagacgccctggggtcccatggccagcctgatctgctgggagagctatatgcccctggcccgggtcgccctgtacgagaaggggatcaccctgtacctctctcccaacaccaacgacaacgaggagtggcaggccaccatccgtcacattgccatcgaggggcactgctttttcgtcaactgcgacatggtcttcactcgggacatgtaccccgccgggctccactgcccggaggagatcggccgcctgccggatatcgtctgccggggcggcagctgcgtggtggatccctacggccactatgtgacccagcccgtctgggaccgggaggccatcatctgtgcggatctggacctgacccaggtgccccggagccggatggaattcgacggctgcggccactacgcccggccggacgtgctgaagctgaccgtggacgaccggtgacagaaatgccgaaggaggaagccccgctgtgaaacacatcaagcccggccgggggccgtcagccatgggagccctcggctccgtcatcgctgtggtcttcggcatcttctggaccgtatccgccgcctccatgggggcgcccatctccttctccatcttcggcgtgctgttcgttatcgtgggcatcgtccaggccgtctacaatttcaagaacgccgcgggcaaaaaacggtactccgccttcgacatcgtggacggcgaggaggagccggacccgctgaatcagcgcttcggcggccagcccccggaggccgtggacacgtccggaccggaggggcccctgcgctactgcccctactgcggcgccaagctgggggattcctatacattctgcggccactgcggcaagcggctgcctgacgtccaagaggaggatcatccatgaaaatcgccctgcaattcgccatgccgtcggagctccatgccctgccgggcgcccgggagctggcgccgctggagaccgtctccggcgttcccatatttgagattgccccggacattctggcctgtgccggcggcgtcagcaaggtgaacgctgccatggccgcggagctgctgtgcctgcggtacggcgtggatctgattctcaacgccggcgtggccgggtgcttcacggatctgcccaccggcacgctggtggtagcgtcggaattcgtccagcacgatgtggacaccaccgctgtgggggaccccatcggcctggtctccacggtgaatcaggtggccttccccacctggcagccggagcgctgtgcggagctgcttgcttccctgggctatcccgccgtcaccggccgggtatccaccggggattggtttgctgtgaaggggcagcgggcggagtggatccggggtaccttctcccccttgctgacggagatggagggcggtgccatcgcccaggtatgcctgcggaacggtgtccggttcgtatcggtgaagtccgtctcagaccacctgttctccgacagccaggcggaggagtacttcgacttcggccaggccctggaggccctgggccgggcggtgctgcccctggccaaggcacttcaaaaagctggcagatagaaaatggagcgcccggcggggatgatccccgccgggcgctcgtatcccgtcagctatgttccgctgggccgtccggctctacggtaaatacttcttcaatgggcaccccgaacaccttggcgatgttccaggccagcaccagagaggggttgtaccgccccttttccaggtttccgatggtctcccgccggacccccaccagctttgccagctcctcctgcttcaggcccagacgggcccggtgctccttcatccggttgcggatcacggctccagcccccagctctcccggaagccgtaccaggcggcggtcagggcgtagaccaccacagaggcagcccagccaaccgtgcagccggtaaggagtgcccgctggggggtaaaaccgcccagcgtcagggtccccagcacagcggccgccatcatcagcatcccgaccacaaacgcccgggaggcggaccgggccagctgcgcttccagcatctcgtcagacttcaaaaagaagtactggaagtccaccgcaaaggcgaagaagcccaggaatccccgcgcttccgtaaacacgcctgcgaaccccagcagggagagaaaacccagcattccatacaatatctgctttttcataagtggcctccctaatcagcgttccaaaaagcggtatatttcgctctttatgaggtgaatatatcatataccacttacgctgtcaagtatgaggctagcatgagcagtctccgcgcgtcaagcgtcaaatccccctgagcttgctttcccgcaagggcacgcaaaactcacagatatgcgctgagaccttcggatgcgcatatcgttctaggatgggtctcgtgccgtccacaggcagccgtgctgcgcgttggggaaggtctccccagaaatctgacacgccctcttctgtatgggggacttcaaatactgcccagcggccgccggcaacggtgcggaccggcaggccgcaggggtcttctcggccggtgaggatcatgcccacgtcatacctctgccggtcctccgggatctgcgccggatcgtccagagcgatgcccaggatcgttgtatcctcctgaagcagcgcatgttctctcaggtatcgtttgaactgctccatcagctgccggttgccttcgccatacccgccggtccggcgcatataggcgatctgcatgtctcccagtttctcaatggtcaagcgaccacctcctatatgttgattcgtgtccggccggacagcgaaatactacatagaattcaaatattttgcaagaacttttttaaaatgattgacttttcagattttggctgatatactaattgagccgctttgaatgggttaaaaagtgtcccaccgggaccgcccccgacagcgagcccgtaatgaaggagttgaaacaacgacatgaacgcaattatcgtgaccggcggcaagcagtacaaggtagccgagggcgacgtggtctacatcgagaagctgaaccaggaagccggcgacaccgtgaagtttgaccaggtcctggccatcctggacggcgacaaagccaccttcggcactcccgtggtggagggcgcttctgtggagggcaagatcgtcaagaacggcaagggcaagaagatccgcatcttcaagtacaacgccaagaagggttaccgcaagcgtcagggccatcgtcagccttacaccaaggtcgagatcggcaagatctccgtctgagtatgaccactgtcgtattccgtatggagggcgaccggatcaccggctttgaggcccgtggccacagcggctacgccgaggcgggcgccgacatcgtctgcgccgccgtcaccagcgccatccgtctggtggaagccaccgtcaatgacgtgctgggcctagccgcatcggttaaggttcgggagcaggacgcgtccatttcgctccatctgcccggagggctgtcccccacggcggagagcacctgtcagtctctgctggcaggcttgatggtttacttctccgcgctccacgacgagtatcccgacaacatcgaagttctggaggatgattgatcctccccatctaaaaatcttcagaaaggatggtccgtatcatgattcgtattggtcttcagttcttcgcccacaagaagggcggcggctccaccaagaacggccgtgattccaaggccaagcgccttggcgccaagcgtgccgacggtcagttcgtccaggccggcaacatcctggtgcgtcagcgcggcacccacatccaccccggtgtgaacgtgggcaagggcactgacgacaccctgttcgccactgtcagcggtacagtccgcttcgagcggctgggcaaggatcgtaagcaggtctctgtctacgaggctgaataaggaagccaaaccgccccggtcaaatgaccggggcggttttttgccgttatgcgttttcttgaaatggtccgtttcagaaacagagcgaccttctggccggcatcagtcaaagccagttgaggggattcaggatctccaggaaaaacatccagaatgtgtctttaaaacaggattttcggctccttttcccaggaaacagtgcccgtataaaggcaatcagcagacatagcaggagatacaggacagacaccagtatgaccagcaggatcacgtcctccatcgtacagcccccttctcgcagaacattttatagcgaaaccagtataacacagcctgccccacggcgccacagactcttccgccttttgattcttgtacacaggaagcttcagcagaacgcctccgctcttgacgtgtggcaggttttcggataaaataggcaggattaggaattctttgaatagatcacaatatgaggtgcaaccatggcaacttctttcatcgataaggcccgaatctctgtccgggcagggaacggcggcaacggttccgtgtcctttcaccgagaaaaatatgtggctgccggcgggccggacggcggcgacggcggccggggcggctccatcattttgcaggtggatgataatatgtccaccctgatggacttccgctacaagcgcaagtacgaggccggcaacggcgccgacggccagggggcccggaagaccggcaaggacggcacagatctggtcatcaaggttccacggggcacgctggtgcgggacgcagagaccggcgagatcatgcaggacatgtctggcagcgagccctatgttctctgcaaaggcggtcggggcggctggggcaacagccacttcgccactcccacccggcaggtgccccgctttgccaaggcgggactccccggcgaggcccatgatgtcatcctggaactgaaactgctggcggacgtggggctggtgggcttccccaacgtgggcaagtccacgctgctctccgtggtatccaaggcccagcccaagatcgccaactaccacttcaccaccctgttccccaatctgggcgtggtgtgggtagaggacggcgtcagcttcgtcatggcggacattcccggcatcattgagggcgccagcgagggcgccggcctgggccacgacttcctgcggcacgtggaccgctgccgcctgttggtccatgtggttgacgtgtccggcagcgagggccgggacccggtggaggactttgacgccatcaacgcggagctgaagcagtacagcccggacctggcggagcggccccagatcgtggccgccaacaaggtggacatcctccccccggactccgacaacctggagcggctccggtctcatgtggaggctctgggctacacgctcctggagatttccgcagccgctcaccagggcacccgggaactggtgaagaagacggcggagatgctctccgtcctgccccctgtcactgtgtatgagccggagtatgtgccgaaggccccggtgatcgatgcctccgccccgctggacatccaccgggaggacgacggcacctggatcgtggagggtccctggctgcggcaggtgatgggcaacgtgaacttcgccgactatgagagccggatgtggttcgacaaggtgctgcgggataatggcttcttccagaagctggaagagatgggcattcaggacggtgacattgtttccctatacgattttgaatttgaataccagcggtaaaatccaggggcgggccaaatggcccgcccctgtttttccaaaattcaaaacgaaaattagagaaattttttacgcttttttgtaatgaactcacaaagtttttttcaaagcttgacaggcgggcccagcgtgttgtacactcagcccaagttcaaaagcacaaaccaatgacgcggacgagtacacggacgtcgcttctccaagagagctgccggtggtgggatggcagcagaaggggccccgccgaatggaccgcagagggcgggctgaacgggatctctccccagtaagcgccgacgggcttttcccccgttaccagggaaagacgtgtgttggcacgtcgccgagtgggcgagcaatcgccaagttgggtggcaccgcagaagtcgcagacttttgtcccaagggaaccataggaatgggtccttgtgggatgaaggtctttttctttttctccaaagggccgcagatcagaaaggagcacaaccatgacattcgagaaaatcccctacaaaatctacctgaccgaagacgagatgcccatgaattggtacaatgtccgggcagatatgaagaccaagcccgcccctctgctgaaccccgccaccggcacgcccatgggcttcgatgacctgcgtccggtgttctgcgacgaactgatccggcaggaactggacaatgacacccgggagatccccatcccccaggagatccgggacttctataaaatgtaccggccctctcccctggtgcgggcctactgcctggaggaaaagctccagacccccgccaagatctactacaagttcgagggcaacaacacctccggctcccacaagctgaacagcgccatcgcccaggcttactacgccaagaaccagggcctcaaaggcgtcaccactgagaccggcgccggccagtggggtactgccctctccatggcctgttcctacctggggctggactgccaggtctacatggtgaaggtcagctacgagcagaagcctttccggcgggaggtcatgcggacctacggcgccgccgtcaccccctccccctccgataccaccagcgtaggccgggccattttgaaggagcacccgggtaccaccggctccctgggctgtgccatttccgaggcagtggaagccgccgccagccagcccggctaccgctatgtgctgggcagcgtccttaaccaggtgctgctgcaccagtccatcatcggtctggaggccaaggcggctctagacaagtacaacatcgtgcccgatatcatcatcggctgcgccggcggcggcagcaacctgggcggtctgatctcccccttcatgggtgaaaagctgcggggcgagcgggattaccagttcatcgccgtggagcccgcctcctgccccagcttcacccgcggcaaattcgcatacgacttctgtgacaccggcaaggtctgccccctggccaaaatgtacactctgggcagcaacttcattccctccgccaaccacgccggaggtctgcggtaccacggcatgagccccgtgctctccgagctgtaccatgaggggctgatggaggcccgtgcggtagagcagacaaaggtctttgaggcggcggagcagttcgcccgggtggagggcatccttccggcgccggagtccagtcacgccatccgggtagccatcgacgaggctatgaagtgcaaggagaccggcgaagagaagaccattgtctttggcctcaccggcaccggctacttcgatatggtggcctatgagaagttccacaacggccagatgaccgactatatccccactgacgcagaactggaggccagcttcgcccagctgcccaaggtgccgggacaagattgaccctagtcacgaagacagcggaggacatgttgtcctccgctattttctctgttccggtggtttttctgcataaatgtcgccggtctgcgcaaactggatccgaatccatttgcccagactggaggaatgtcttgtgtccaatcccaaccgccgcggcgccatggcgctggtgtccgcctccctgtgcctgacgctcgccgcgctgttttatttcactgccccggcaccggccctcaccgcctccgcccccatcgcggtccctgcggctgcggactgggggctatccttccccacagagggggaatccccagtgggcaatgcctctgcggaggacctggcccaatacggcgcctactacctgggggataccagccaaaaggtcctctacctcacctttgactgcggatatgagaacggctgcacagaggccatactggacgccctgaaaaagcacaatgcccccgccgccttctttgtggtggggcatatgatcgaatctgctcccgacatcgtccgccgcatggcggcagagggccacattgtgggcaaccacacgtaccaccacccggatatgtccagcatctcggacatggccgcattccagaaggagctgacggacctggagaccctgtaccaggagaccacaggacagcctctctccaagttctaccgcccgcctcagggaaaatacagtgtggagaatctgaagcaggcccaacagctgggatacaccaccgtgttctggagtctggcctatgtggactggaacacggacgatcaaccttctgcggaggaggcctatgccaaactgctgccccgcatccacgacggagccatcgtgctgctccactctacctccgccaccaacgccgcgatcctggatgacctgctgaccaagtgggaggagatgggctacaccttcgcctccctggaccagctgcccgggctggcctgaccacgcaccggaccggacgcagcgcccggcttcattctccccttgcttcctgccgcctgacatgataggatggtggagacgaaagggggcggcgtcccatgcgttctctctccaaatccaagtggatggaagctgttcagtcctacgtgctctatttctttttctactccatgctggggtggctgtatgaggtgtttctggaagtggtggtctaccgctggggattcaccaaccggggtgtgctgctggggccctactgcccggtgtacggcgttggcgccctggtgttcctgctggccttctcccgcctgatggctaagcgggagccagcgtggttccgctgggtgaagccagtgctggtgttcctgggctgcatgatcgccgccaccgccatcgagctggccaccagctatctgctggaggccctgaccggcgcctggccctggcagacctaccgagactacgctatcaactttgagggccgtatcgctctctccccctccatccgcttcggactaggcggactgctgttcctgtacgtgctccagcccctgttccaccggctggtccacagcctgtcgccccgggtgcgccgcggggcttgcatcgccgttctggtgctgctggctgtggactgcgccgtgctgctgttccggtgatgccgcctgccgcattaatcaaaagaggactgacttggtcagtcctctttctgttcttccatcatcttttccagatactgctggatgcagcggaacgtctcctcgctgaggtcgtgttccaccttgcaggcatcctccgaggccacctccggcgttactcccagaaggacaaagagcttggagagggtcttgtgccgaccgtagacacggctggccacttccaacccgctttcattcagagtgatgaatccgtccgcatccatcgagatataaccgttttcccgcagcttcttcatggcgatgctgacgctgggcttggagtatcccagctcgttgacgatgtcaatggaccgcacctgcccccgccgctgctgcaaaaccaggatggactccagatagtcctctgcggactcgtggattaccatggcgctcaacctttctctttggagaataaatcacttgccggaaaacgtgagccgcctatcggccgtgatctatttcgagcgggaaaggtcatgcggatagtggaaaaaagagagacatgctttaacatgtctctcttttttggtggagataagcgggatcgaaccgctgacctcttgactgccagtcaagcgctctcccgaaccatcgggtatgcaccccctgatggcttgggaaagggcttgaatatcccgccccggcaattgatgagagacaagttgcagtatagcatagaaggtatatgttgtcaactggacatacctttacgatatgtacccctcgccgtggtcgtggcgagggtgagagcttattgcgccatgggcagttcataggtagcgcattcgtcgatgctgtcgataccattcaggaactgctccacattaatgttgaattcaatcttgaccctatagtcccggaacaccgaaaccttcttgatgatgtagccgcagatcattttcttgacctccatcgggctttcatcaaaaatcttggaccaggacacgatccggttgaactcggccttcatctcctcgatcttagagtttccatcattcagttctgcggtaagggtcgtgattcgttcactggtggacagtaccttctgtcgggtatcctccagcatttcagtcagcacatcttgcggcagggcgcttttcccttggatcgccttcagcacctcggacttgagggattcatattccttattggccttggtgttttcggctctggcccgctgcaattccgagcgtatcattgccatctgcttttgaaccgcacttcccacaatcatgtcgttggaagctccctgcatcttgtcgaagacctgatgcagcacctcagtgacgatcccgtccagaatgtgcattgtgtatccagtctgtcctgtacattcctgacggcgccgggtcttgttgtagcatacatagcgaatacgctttttatggaccggcgtcccatccgcaaggcgggtggttgtcccgttggtagtgagcaccagccggcctccgcagtggccgcagaagatgttcccggaaagcagggattggcctgcggtattcagcggtactgtgcgccgctctttccgctcattggtccgctccagcatcagtttctgcgccaggtcgaattggtctggggcgatgatctggagggcctcaaaggggccggcataggtttctccgctccgaaggattcccttatagagcgggttgtgcaggatgccccccacactggcgtcgtgccagttttgtcccttccggtttttgatcccgtggtcgttgaggaagttggcaaggcgccatctgccgtaaccggacgaaatgcagaggtcaaacatcatccggacgactctggcctcgtcctcatcaatgaccagcatgtacacctcatgtttgcgcttgttgaggatgccgctcttttccagccggtacccgtatggtgcgtttccaccgcggaaccggccttcctctaccatctggccaagggccgttttggtgcgcatcgaagttttctggctctctccatcggcctgccagaaacggatatagttggtcaggcggtccgtgtgggactcaaaccgctgctctccttcctgtacgctccagacgcggacgccctttttagtaaaccactccacaacgaagggtgtttcatctgacttgcggcccagtcggtcgaacatgaagacaagcagaatatcgaacttgccctgctctgcatacttcttgatgagctgcagtttatcacggtcatcggcgctgactttataaccggatacgccagtttcctgctcctcgcccacgatgacccagcccattttcgccgcaaaatcgtggcaggcttttctctgcatagggatgtctgcctggttgttttcatcgtgatcgacctgcttgttggtggaaactctgtataaacaataaactctttcagccattgatatccgtcctctcatgttttttgtgtgagagggcggacacccaattcattctattcgattatcaaggttcccggcttttgccatacccattatctcacactacggccagaatagccaggggaattgataatctttttataaacaaatctgcagtaaatgggctggtgtgttgggttatcctgtactttgctcaaagtttttgggcctcatcagtctgccaaaagcgaatgtagtcaagcatgcgttctgcatcaacgccgtctatgatctctccctcatagacgctccaaacatggatgcccttcttggtaaaccactctgcgatgaatggggtttcgttgagattgcgtcccagccggtcatacataaagaccagcaggatatcaaactcaccctgctcagcagcctttctaatgcgctttaacttaacaaggtcatcagtgctgactttatagccggacacgccgatctcctgctcctcgccaacaatgttccagccttttttctctgcaaaatcgtggcaggcgttcttctgcatgagaatgctttcctgatccttacctctgtataagcaatagactctttcagccattttactgaccatcccttcatcaaatcttctgaatgcaagaccttcagcaagtcgttctatttctggggcattgcataggcgctcaggagagcctgctttactaatacagcaacttcaggattttctttttctgcaaagcagagagtgaccttatagccctgaaccgagatatgcatttcaggcttttcttcgtcgattctgagtaccctgttcatagtaatcctcctaaaaataaagcatcggctatcctaaaaagatagccgatgcttttcaatttctaattgtaactgcttagtggcgatagtccttttacagagtaggttcgattgactgcataccgatttcctgtacttggacgatatccaatgttggcagagccttcagataattctctacattccagtattggaccccattttccatctgcgcatcttcgccgcggtacaggatatagcgcccatggatgggaccaaaccgccgttccgtcctctggcatttatcctcatcgacgaggtgccggtattgaaagggaacctgtttgctgctgtgtttgatttcaaagatctcacaggagttttctttctggtcatagatgaccatgtcaaactcgccagcctcaaactgcagtttgaaaacacggtgatccttgtcggccgccttcatggtttccagcagcacaatatcttccatcatccggccacggacttcttcaaggatgcggcccgtgatctgcgttttatcatattcgctgagcgccgagaactgctcatcctttaacaaggaatggataagggcctgggcctgacaatatcgcattccaggctgtgtgaagagaatatgttccactggttcaattccggggtccgccgattcaatgggacaatccacaatcaactccaacgcggtaagatattgcttaatctctatgatgtgagcagttgtgataccgatggactgctcctccttgttccggatatccagcagttccatcaaacgccgggtgaccgcctctgtatcaatggcatccagcgcctctgtgcgcttttcggggtcacgctctttccgcagatttgcggcagtgagccgcaggtcatgggagagaaaatcatcggtcagcactgagatcaggaatcggtggttcatatcctctatgatccggttgatggcgctggtcagctctccagcttcatacagagagtacaggtggcggaaatgcccgcccgactcgtagcaggccagggagtgctggatgttcttgcagattgccgtgtcgatgtatcttcgggtggactcgtcatcccggaaggatgcatcctgagcattcacatcttcatcgtcaaaggccagctctccggcgcgtagtgtgccgccatatcggatgtactcatcaatgctgtcgatcccgagcagacggctatactcccgatatgggatgaaggtcgtgtggatggacttggcccggtcatacaattcttcatccattgccagccagaagcccagggagtccgtaccagacaggacgatcttcattcccatggtggcgaacacatcggaaaagagggcagccgagtcaataaagtcttccatcagcgtgacctcgtcgatgaacacatatcggaatcccgcgttaaacaacttcttgagatcccggttcatcatcgccatattgtcagtcctgcgggctttgatgtatgcgatacggctcaagtcctcctttgtcattctgccaatggcctgacggagcatggtgttttttccagtctggagcaggccaaagagcagacacacgcggtcatgacttctgccgtggaggtacatctccagttgctcaaagcagtcgcgtgaggccagtgcctttgatttctgcgcaacggcagccagttctttgccgatggttatatcggtttcgacacctgatattgatatgcttttcgggctgcttccactcacttatgcgtcacctcctcgccaatcacgccctgatatgttaccgctttctcaattccattcttccgccagaaggaagtcacggatattccggtgcttgatcccgttcctgctcatgtcaaactcgtcgagggatacgacatacttggggaaattgtcctggatgccatcgtatgcaccgaactcccgtttcaccgtatcttcagaggccagcaggtatgttacctgcacatagagtttttctcctcttttttcgcatacaaagtcaatttctttttctcctgctctgcctactgtgacaacataaccccgtcgcagcagttccatgtagacaatgttttcgaggatcaggttgatgtccttcatgttcccgccgaacacagcctcccgaataccgtgatccgcaatataatacttttcgttggaggccagtatctgcttgccctgcaggtcctggcgctttacctgatagaagagatatgcgtcacagcagtaccgcacatagttcaggatggtttctgccgcgacagtccgctgctcatttttgaaaaacttagccagagaggacgctgagaaaactgttccgacatttgcggtcatatacgcaatgatgcgctccagcaaatcaatatcccgaatcttgttccgttttacgatatctttgagctgcacagaattgaatagatctgtgagatactgccgggagggttcttcctcataccggaggttggccagatagggcattcctccggccagcagatatttttgaaagcattgctggatcgaatcgcttggtgcaattgtgtggtacagttccaggaattcagcgaaggagaatgggtaaatcacaaactccacataccgtccgccaatataagtggccagttcaccggacagcagttttgcgttggagcccgtaatgtagatatcgcagtccagcgccactcgcaaagaattgacgcacttttcccagccctctacttcctggatctcgtcaaaaaacagatacgcttttccctcgatgccctctgcccgttttatgatctcatcgtgcagagccgttgcggtctgcagatgggagtaccgcatatcttcaaaattgattgagatcatctgagacggggcaacaccagcctccgccagttcctctttgatcagttccagcatcaccgacttaccggagcggcgaatgccggtcattaccttaatcagttcgcccccaatgaagggacggatgcggttcatatacagttctcgtttgatcatgattggaacgcctcctttctatcgttgacctcagtatatcccatttacaactgaaaatcaactgatataatctaattttatcagttataacttataaaattagtcgtatgttggcgcaaacactgtacacagcttttcaatttctctcaaagaagcccccgaatgcactcactttccagttcaacgatgtcgcctatcggtatccttaagccatcaaccagaatcaatacctgatccgcctcatggattcttttcagcctcccggttgatacgatataccggccgccgtctttctttgcgtcgggctggaaccaggtcaccgtgatttccggccgctctttgatccgctccaacagcagttgctgttttgagtccaaggcagccctggcatcctcgtccagttccatgcgctggtcggtcagccgggccgtttccacaagggcggcgctgtggccggacagggccgcaaagggtgcgaactgggccgcacggtctgagagcggcatcctcgggtgcttggctgaggtaggatgcggcaagttgatgatatcatcgtatggtccggtcatgctttgtgacctccgatttggttgtttctctccctggctgtggcgccgtcctccagattcagtcctttgaggatggcattcttgccaaaacgctttttgatgtccagcatggtttcctggagttttctctcccgtgcatgggcagtgtcagcctcttttttctgcttttcctttgccgagtagtccgtaaacaggtcaatctgctccggcaaatcctccggcacagaagactcgtccagcaggtgattggcgcagagggtcagccggcgggccagcagggttttatctacgatccggtcatacaggctggtggctgccttgagcagctcctcgccggaggaagtatatccgtccagattgactgtaccatgagcatgcttgggaattttgcgcccatagcggtccgtggtgacctctccggtgtagactgtacccttgaggttttcgatgtcatagcctactgtgaggaccagttggttggtcgcaagccgcttatctaccaattccagcgccagtgcatcggccatctcctggatgaccagccttgccttttcaaatgggtatgggtactgcagaatctgcccggagacgatgctcttgttttctggtttgtatgccttaatgtccgcaatggtgcagggttcccagccccaggcatggtcgatgagcagttctgcgttgacaccaaacagtttatagagcagttcctcgttgtgataatctgtaggctgcccgatagaacaccgggcaatatctcccatggtgtacaggccgttggcttccagcttggcggcatagccttttcccaccctccagaagtcggtgagcggacggtgggtccagaaggagcggcgatagcccatctcatccagttctgcgatgcggacgccgtattcatcggcggggacatgcttcgcgccaatgtccatggcgaccttggccagatacagattcgtcccaatgcccgccgcagcggtgataccggtcgtctgcagaatgtcgaggatgattttccgggcaaattcacgggccgacagatggtaggtctgcaggtagctggtggcgtcgatgaacacctcatcgatgctgtatgggtagatgtcctccggcgccacatgcttgaggtaaacactgtagacgcgggtgctccagtcaatatagtgggccatccggggtggagccacgatatagtcgagggccagggaaggatttcgccgtacctccgggtcgtgagaggaagcgctggtgaactgccggccaggggtattccgctgccgttgggcattgacctccttgacccgttggatcacctcaaacagcctggctcgaccggaaatgccataagacttcagggaaggtgtgaccgccagacagatggtcttttcagtgcggctcaggtccgccaccacgaggttggtgtccagtggattcagcccacgctcgatgcactccacacttgcgtaaaacgattttagatcacagcaaatgtaggttcgctccttcatgcttcggtcaccccttcctctttatcttccgacgcattttcaaagccattatagcacatttgttctggttgttctattgtgaaaaaacaccatcttgtacccattggaaaaccagcacagaatgctgtgatttctaaagcgatatgcctccatctttctgccgcaactgtaaaagagagccgccagtctggaaaccggcggctctcttttgtcagtcattttttctctctgcttgttcctccagggcaaggaaatggtcgaagtcgctttcaaacatgcgatcctgcacaatccggtatttttcaaactcgctctctgcgaaggctttggcgatctcatgcgtcacccggccggtgtcgtggaggatctcatgctcattgaattccaggaagcgattcagccgctgtgaccagtcctgcatggtcatagggatatggcggcctgcctggtattccgcatagtccaggtacatggtcacaatgcgttccagcgcctgcagttcctctctggaaagatagttcttagcaatggacacatcatacttctgtatttttccgtttggatactgctcccaggaagttaagcccatgtgaggtttttcagcgttggctcgctccacaatcaactccgccgcagtatgacggtggatcgcccagtggagtttgttctgtacctcggaaaaaaacaggcgtgtggttttggctgatttatcataatccagagccgtggcgtagatgtcggtgatcttttggtagaacttgcgttcagacatccgaatctcccggatctgctccagaaggtggtcgaagtattccttggtaagtacactacccccgtttttcaaccggtcactgtccatggcccagccctgaatggtgtagtccttaacgatggtattggcccacttgcggaactggaccgcccggtcattgttgaccttgaatccaaccgcaatgatcatctgcagattgtagtgcttcacctggcggctaacctgacgggagccctcagtttgaactatccggaaattccggatagttgcctcctctgtcagctcaccatcctcatagatcttctggatgtgctcattgattgtccgaacatccacatcatagagagccgacatcatcttctgggtcagccagatattctcatcctcatagcgcatttccatgctctctgtactgtcaccggtagcggccacaaaggtcaggtattccgctgcgctggatcggatcgcctgttcttgtttatcgttccgcactgcaacgccttctttcttctgtatcaattccatattgggccagcagtttccgagcttcggcttctccctccggtgtgatgagggcgggataggttcgcccggcagcgttgatcagcccttcctctgaaagtttgttcagcaggtcgtgatcatagcccttccagcatcggcggacaaggggatacttttccagttcctttttcttgaccgcccgcatttccggtgtatcccgttcctcccaggaggtcaggtacatcagcatgagggtcaattcccgaatggttttcttctgtttttccggcattagcctgtcctccaatctttttgacttactaccatcatatcacaggacgggctgttcgtctattccacaatcattccgggatatacatcggaccactccgtatgcgtcattactccgctgctgggagcgcagtgggcgagaacgcagtccgctgtccagttgacccattccgagttcaccagagcctcttggtattcctcagtccagccacggactgtattatggacttattacatcatcattcctgtacatatttcttcgcctgtttcatcttccgcacccatcattcctataaaagaggactccatatactcgtcataagcccgtgcgtatctctcgtacttctcaccgccggtttctttcagaacggtttcatcaaatgtccataaagggtaggagcagaacccactttctttgtagagcccagtatctttagcaaatccacgattgagcagctgcggcgcaaagggacagttgtttatatcgacatatgcactgtttttcaagccaataaattcttcaaaagattttgtaagaatagcgaactgttctttctcatctgctccttggataggcatatcaagaacaatcgcaaggccaggcagttctttgcccataaaatcataaaccgtgtacaattccaccctcggctccaatataacgggcgtctcaaaataatctttaatttcaaatgtcattttttcctcctgataacaaaatatcacctatgctctaccatatatgtaaaatcgctttttccctttgtgtagcctatctctttgctcatttggcgtcttccactccgttcagaataaaagaccagggaatgctggttacccactccctgatccattgcgattaaaaacccagttcagatatcttttcccactggaggatgtatttctgatctatgattcgattctcatggtaatggccgaaaaaccagtaggcgaatttacaccgctggctgaccatttcaagaaagtccgtcagttcatccgttccataggatggattgatctcctgcaccacaccgctgggagcgcagtgggtgagaacacagtctaccgtccagttgacccgttccaagtttgccagggcttcttggtactcctccaagctgggcatctcctcctcccaccagctcacgcctttgacccggaacatggaccgcatccggcgcatcagccaatactggcgctcgaagtccggagcggcgggatcaaggattccatcctgaatatcatgggaggccgcaccgcccattgtgaaccaggcgaggccgccgaagtcgaagacctgtccccgcataaggtgcaggacatgctcccgcacaacatggacccgtccgccattccattctttttctggtagagtgttcagcaagtcaaaattctcatggttcccatccacgaacagggtggtgaagggcttcttgttcagccagtccaaccaatattgatctttctggcttccatcccacagtcctccaaaatcacccgcgatgaccacatagtccccccggctcatctccttctgctgtgggaagtatttgctcccaaagcgttggaagtcgccgtgagtatcacccgtaatataaattgccattccatcgcacctcgatttacagggtcatttgctgctgccctggcagtggggagctaatttctgcatcggttgccgtgcggacaccaggaccgttcctggttttcgttgtcaccagcaggccatcttgaacaagctgctccatcagttcgcccacgaagcggttggcaagattatgcttgccttctttatcacagagcctgtgtacagagaacttttgagcgacatttaaagcaaccgggcctgtgatatacaggtttttccgttttgtccggcaccgttccagaatttcatgtgtgatctcctcgcgcttggtctccaactgtgccagatattcctcatcggtaatatcccaatacctctcgtagcagtcgaagccatagcagcagaacgatttcgcatccttcagtagttcttggatggctgggatctcgtccatctctataataccactaaagttcatcggatgcagtataactcctgccagcctttcgtaacggtatcagatgtgctgtccccaccgggctgtagatcccagcccgcactctggaacaggctgcggctttcttcatgaaatttggcggcgtcagtctcagccggccagccggaatcgaactgatagcggctgcgaatccggaagtaaacttttcggtactccactcttgcttcacctcgttttcctattcccaagtgctttttcaaacaataccacaagtaaggcggcaacatctattcaccaataccaacagaataaatgttcataaattgacctattctaccgatatccttccaccagaccgacgctgaccccaagcgcccagtcaatctgtttcatctcggaggtgtccaatgctccaacgcgctctctgagcctggacttatcaatagtgcgaagttgctccaagaggataacggaaccacagctcaatccattcgcttgcctattcaaacaaacatgtgtaggcagccgcggttttcccatcttgctggtgatgggggctgcgatcactgtggggctgtggcggttgcctacattgttctgcagaatgagtaccggacggataccaccttgctcagacccgatgactggccgcaggtcagcatagtaaatgtcaccacggctgatttcctgtctgcaatatgttttcacagaatacacctcctcagcatattgggcttaatatcacaaaaatagggaccgcctccgcatctcccgcatctggttggaatggctgctcatacggcatgttccggtcagtaaacgggttttggacagaagcgatccccatagcttctgatattaagacttcacatttgtgttgtctttctttggcgcttgtattcgacactacttccccaagcgcaggagcctgtgccattggcatcagctccatagggcgaccatctgaaccgcggctggcttcaccgcgtcatgggactctcacccccggcaggatctctgtcggccgccctcattgcttgatccccatttcggtggggctgtgactggacggaagtatcattatccctggcggagtcattgcgatacagcttgccacaggctgttttttggacggatggacccgcttagcaccttatttggccgtcgttgatagaggggaaatccgtcaggctgtcataaccgaacaaaaatgtataggtgacttcgtttgcagcctgtaccagaacctctacagatggttttcgcgcatcctccagcgtcgcttgcccctgttcagcaggggccccgtcaggaaagtattcagacaatcggatattcggttttcaaggaacaagtgagaagcatttccttctcgcttgtataggggaaggtgtcggcattttaataaccctccaatttcaattttctaaaagttttttcaaagacttgagaatacggactttccgtttatgcactgcaggctgtgaaacgccaatctctcttgcatagtcaagttcactttgtcccttaaaaaacaacccctgtaccaatgcctgatccgcagcaggcaacgctgagatcgcttggtacagggcctctttctttatttgttcaaggatgatgtgttccggagtgttgatggcgtcaataaactcccggaaattttcataggcgccatcctgacttccgatcatcccactcgtctggatctcatggtcaaaaaagctctgatcattgtccttgatattccaccgggttctgcagtaagtgcgatagacctcctctgtcactatgacttcctcatattcctgagtgcaggtgttaaaaacaataagggtaaacttcccgttggattccatgtgcctttcctccaaatttcaagattttgatggcgaatcaaaatcttgaaatcaggggtacttggcgatataagcctcccagcccatgccggccctcccagtgccgggcagaaaaatagccggggacgcatttctgcatccccggccgatccccgccgccatattgcggcaggaatacagagggccgggacactttacagcgtcccggcccttgtcagctggtcctattcatttttgcgcatacctgccactgtactgagtatagcagaggcaaagtcggaagggagtagggatttcgtcggtttttcatcgggaatcagtcgggataaagtcggggcatctccaattcttcctgaagttccggcacagcataaccaaaaaggcagagggacaataagaagatcgcctcgcgctttcggtcatagaatacgcttcgctccatattcagctcatccagcagttccttttctgtgctgttgaaacggtggataaattgtttggtcaggatctcatagtaaagttcaccccggtcagggtatcgtttcaagcggagaagggcacggtcgatcacatccaccagcatccggttttccatcacacagcagacccgttcctcaaactcctgcagatccatatccggggcgaaactttgcagatagataagcccggtatcagcgtcctgagcgcccagctcccaggcgtactcatgcagttcctccacccgctcactgaggacccacaccacatcccggtagattttcaaaatcagctttacccggtgataggccagctggctgtcaaatccaagggtcgccatctgccttttacatttctgcaaagtggaactttcttttctcatgccattctcctcctcccatgttcgctaaactgcgaacaaaatgcatataacaaagcctgtgaacattggtgcggctgcgcccctctctcaggagggggcttgccgtaccaaacttatatgagattgcgtgtttccaaccgaatacgcatggcctgcttggagacttggaagatctgagccatttccgcaaccaactgctcattgctcctgcctgcacgcaaacggtaaaaacttcttttgatttgcggcaggggcatgaggagagcagtagccaaagcatccgcctgccattcgaccagaccgtggctttcatccaaagatgtttttccttcataggcagccacatcgcctgtgccggagtacagcttctggtgcaggacccagtgccccaattcgtgagcacaggtgaaccgcagcctgccgaggagcctgtccacacaaagccgctcctccaccaggattgttccggccttgactgcaatcaaacggtagcgtttttcatcttggtcgtataaaatagccgctccttcatcaaaaatcgtttccccaaggatgctcccgtttttgcgtaggcaatgatattccagagttagatcaaacttggtctctatgatagtttcaatgggaactgcctggggaggcccgtccaacaaagcgggatcatactcttgcaggatcttccgtccaatggtttcaattgcgtccaatcgatactttggtacagacaagaaaatccccccttagttctggcggttctgtagcatttccataaatgccttccattcctcatcggtagcatctacttcctttgccactctcaatgctgcgcggacgatgtcatgctggcggatatagtcaggcagatcggccggaaccgtctgcctggaatctgcggccagatccagcagcatttcatgctcctgcttatccaattccagaaaagaagagatccgctctacaaatgctccctctggcgctggccggcgaccctgctcaatatcacacaggtacccattggagataccgaggtgtttcgcggtatcccggagatttaatttggcctctttgcgccgtgtgctgatgaaagctccaaaggtcactggtctccctccttcatagagtttcgctggtttgcgaacatcttgtttatattataactggcacatctgttcgacacaagggcaaaaaagaaagcagaggccaggtgttaaaattccataacacctggtccctgttttagagaaacctgtgggcgatccgcttcatttcttccacacactcatgaggtgctatgatctgaatcccgcccataaatttgaatacccatccgtaaaaggtgccgcttgggtcgacttcaatgtttgccgtaaagtgttcctcgtcatatgtgcgggttggtacagcttctccataatggtctatgatggttttcatcagcttgttctcacagagcagttcaacagaaactgtgcggtcagcagcaaacatatcaacgatcttgttggtgtagcccgccacatcaaagtcttcatcgggggtaaagccggagggaagtatcttgatccccgacagacggtctactcgaaagtgggccatccgctggtgtttgtgagaaaagccaatcaggtaatagtggtcattcttccattccaaagcgtaagggtccagttgatagagataaccgccatgtttgagaactcgttttttctcgggcgtatattcataatactggaactgtatctgccgcttttccaagattgccgtttggatggcatcaatgatgtaatagacttgctcattgtccggtttcacccggctggacaggctggcgagctgccgaagctgctctgcctgatgtgtgctggtcagacggcataatttctgtaccagttcctcggatttcctggcagaaatgatcttcgaggatgctactgcgtctgtcagcattttcagttctggatactcaaacaggcggcttcccataaaatattggttttgggtactcttgaccaccacaatatcaattcctgcatcgatcagcgcattggtatccgcgtaaacagtctgccgcactgcctgaattcctttttcattcagatgggcaatgatgtcagatactgtggcgggatggttttcatcagtccgctcatagagaaactggagcaattccagtatccgcatatttgttgaattctgcatacttcacctcctcgattcttaaaatggtctattttgtatggtgtccagtcccaaagaccaggaacagggcaaccacacagagaagcaggcccatccaattccggtctatgatcagcttgattaccgccgcaagcagcagaccgcccaccaggagcacaacgccgttcattcagcgtcctcccgaggcatatttccccatgtggatgtccagcacttctctgggcggctggatcagcgcgtcctcatactggcacttccactgaatctcccggctcatctggccatccgccacgccgtctatggtttccccatcctgaatggggttatcatgctccaatatgtacgatgccacattgtaggcgtggtttaccacccagttggggtccatgttgtggaagtggtactggaggtcgggcaggaacagggtgctcatgcccaccgtgtcgatgagcatatcctcggtgccctcaatgttgaagaagcggacattgaccccgaagcgaatgaaacggtccgacccctcaatctggtgagaacgcacatcctccgccagaaacagcttgccgcagttctggaaatagaatgcctcacaggtggggtacagctccgccagagcctccagaaagtcggcatccaggttggcacgctccagcgccggaagcgccgcagccagcatatcggtggccaccacctgatatttgcactcccggaagatccgctcccggtcctcctggcagtcccacatctggctcatgaggaaggcgtcgaagcctttgcccttgaacctgtcgcatttcatcaccatcagctgtaccgggcatttgccgtccttgaattccgcgatatgctcctgtgcggcaaagccggccatttgcttatcataacagaagcactctgttgatccgatgtgtttctctatcacagcggtcatggtttctttgtccggcatgtccaccggttctttaaacaaaatctgaatgagataggggcctccgggctggggaccctttttatcatccaggttttgctggaaaagttgattgctcatttggtttcctccttcttctccgggaacagcttccaccggaactccaactctttctggacaaactctttcggcaggccccggggattggcaatgagataccatacccgaaaggtgcgtttcttcggatctgtttcctgctggtagagctgataacccgcctcatcctcctgagtccactgtcctgtctgccgcttggcctgcacaaagggttccaccacctggtccagttcctctttggtgaggcttgaggcccaggcatgatccacatcattggcgtgggagaggtggaacaacatcgaacccatccagttctttgccttgtgctccggcgttccgagcaattccgcctgacggcggtactcctccagctgttccgctgttccgtaccgttccaccatctgttcccgcacatggatgcaccagctgtaatcccccggctggataaagggggcacagaccggctggagcgcctctgctgggtccacctcaaagcggtcgataaagtcgaggtagtgagctttgatcaggggcagaaaggtgtccagcaacctggtgttcagccgcaggtcctctgtcagcatccgaaagaatgaaccgcctgttgtcggttctattttgaaagagtagagccgatcatctccctgcttaatgatacagctgaagcccacctccacatttccatagccgatttcgtagtctatgtagttgtagcggctccggtcaaaccagacctgataggtcaggccgtttttcattttctttttgaagtcgccttttttcagccgcttccagcccttttcctccagccccaggccgttccataggtagtccagaaactcctgaaatatatctgccgggcgtttttgctccacggtctccacctcctgacgaatcctccttaataatcaagcaggatgggcacctgctgttcctcggcaaaccgcatggcccgccagaacatggagaaggcgaacttggcaagagattgggtgtcatactgggtgtgttccgggatgtctgccttgctatactgtccatctgagtctacggttccgtctaccgggtatccctccgtgtctgcccagccaaggatggtatcctcatcggcctgccatgccagctggttcagcctttccagctccttccgcagtccgcccaaggtggcgatagcgacggtgtcatcggtgggcagagggccttggaacagaaagctgtcggtgaggggaagccaccaagtcacgccccgaaacagggaccacacccgctcctcgtccgatgcaaggcgggcaatcaagggatgctccccgaagatccagtccttctccacggtgggaggcaccggttcctcgtatgtacgacaggcggccaccagcagcatagcgccgaaggcatcccaatccggcttgtccgtgtaatagggcttctcattattctccggccagggggcgtaggggggctggtccggctgagaaatggcggccagaatctgatcccgccagttctccaccgccgcctgaacatcggtcggggacaattcctcgtcgtcggcgggttccccatccggggtgatgcggttgaaggaatatccgttttcctccgcccactgctgaacaacggttttccagttgtgagaatagtaccgggtcagcgtcccggcgtagatgtcaagtcccatagtgtttgcctccttttctgcttggtcaaagccgttccagggtacagtcgtgcccggaatggtctgtatccaaaatgatttccacaatggtgtccatcgtctcttttccgagattacggacgcttttttcataggccagccactggatgtggatgggttgtccatactcatgccgcccaaaaccgccccgaagaatatcgttgaaagcgttcaggttccgaccgatcttccaatccaagccacagatgaacacctgctccacctcgtcataaaaaccggccatgttagaaaagcggcgaccgtcaatggtgaacatctctctcatgtccatataaacggctcctttaagtcatatttctccatgatcttattttccaaggcttcataggcatccatatcctctggttgcgctggaatacccttttgccaataaccgttcccatagtagaaaaacatagcccagtaataaggcaggtcatggctgaacatcgccactcccatggcatcggccactggctctgccagcggtgagcgatccactatctgggaggcttcctcataggagatccccaccagctccaccagcaggtgcttcaccagttcacagaagctgtgctggttgaatatgacctgaccatcctcatctttgaacacgatgccatctctcaccataatattctgctccgtttcttactcctcgtccccggccttgaagttgtagatggggcggatgacctttaccacatccgccgtggggccgatgttgtccagaatatcctgcatccccttgtaggccatggggcactcatccaaggtggccttgctcaccgaggtggtgtagacctctgccatctgcttttgaattcagacaccgtgaaggactgtttggcgtccgcccggctcatcaggcggccggcgccgtggggagcagagcagttccaatcctcgttacccttgcccacgcagagcaggctcccgtcccgcatattgatggggatgagcagtcgctcgccctctttggcggacacagctcctttccgcaggatcatggcgtcggtatcgatatagttgtggatggtggtgaactgctcctccacatggagcttcatgcctttgacgatctcgtccatcatggcctgccggttgagcatggcgaagtgctggacgatcttcatgtcgtggatatactgctcaaacaactctccggacacataggccagggccttggggatgttggtttgcttgaggtttttcagtttcttcagttctttctggatctccttctcccggccctccgctttcattcgggcaatcagcgcctcgatggaggcatcgtcagtgcggttgagcaccttatagcccgcctcctggtaatagctggccacctccacacccaagtgacggctgccggagtgaaccacgatgtagagatttccctcgtcgtccttgtccacctcaatgaagtggttcccaccacccagcgtaccgatgcttttttccgcccggaggagatccacatggcgggcacagcacaactcactcaggtcgatctcattgaggtagcggtgggccttatcccggatggagaagccggaggggatcttttcataaatcagcttgtccagcttttgaagctccagccgcccctcccggatgcgggtggtctccatgccgcacccgatgtccacacccaccagattgggcaccaccttgtcggtgatggtcatggtggtgccgatagtacagcccgccccggcgtgaatgtcgggcatgagccggatgcggctacccgccgtaaattcctgattgcacagctcctgaacctgtgcgatggaggcgctgtccaccacatcggtgaagatcttggcctcattgtattttcctttgatttcgatcataatttcctcgcaatattctatggggcatggccccgtcaagtcatctcatacagcagggcagcgtcgccctgcaccagttccagatgggagcgcagcgtttcaagcccgctttgcaccgcctcggtgggcagatcccagtccggggcaatttcagcggccagctccgggaggtcctgctcccgcagagctgccagcagttgagacgccagctctccctccagcagagcgcagtccagggtgtcctccgtctggggagcaggaaaacggacatccagatccagttcgctctcacaccagtcccagatggccatatagaccgcgccggagcagtcgccgtttgacagttcctgccgccggccgtctttgagaaggtaaaaggatgcgatctgtgacatagttgttcctcctgaatgttattctttttccatcagcccttctgcctgcatccggatcacatagaaggcccgcacccagtccagttcctgctccatggatttctccaaagccagcaggtggcgctttcccagcctgcggtccaggagggcaaagatgcggacaagaggattctggctgacaaggcttttctcaatgctctggttgtcaaagatcccaaacgcctcatagaacaccttttggtcaaaggtgccctgctccagcgcaaaggcatgagcctggtcgatggcttctttcgcggagtcgcaatctttcagcgttgtggaccgcaggtgatgaaatttcgtccacacattctcaaaatagatgtagtagttgctccgcagtacttccacaccgtccatacgaatggctgcccggccctcatggtcggcgcttttgctgtaactggtggcaaaatactgaatgtgaccccggagcgccgggcacaggtaatcattctccaatttgttccggattccactccaagtggatacgcttgccatgttaccacctctcagtcacgatagatacccacgaccaggatatagtcatcatctccatgaaaatcctgacacttgttatagaagtctctcaaagttctaaattcggccaacgctgcatcccgattttccactccgttctgttggagatacttgtccaggaaagcatcttcatccacctcattgagggcagaaacgatgtcatccagatcctccaagagagtgtaggccacctgaccatcatcaacgaaatcaacacctacgattgcttggctgagcggttcatgagagatcggttctgtcccagggcatcccaccagcgccatgtggagctcattccacaggcggattttttcggtgtagagaaattcatgctgatttgccgctgttttcaaagcatcaaccgtattctcgccactgaaaacagcattcatgagttcatcttcagcaggggcgcttccataaaaatagtgggcaatgttttcagtgttcattgagatacctcgccagtttcttctccagcagttctgccatatcattgcagaggcgctttaccttgtcctgctcatgggcgtagtaccagatggtttcctctccggggcggagcaggagctggtcgccgtccgcttctttccagaactcgcccagcacacaataccgctcgccatgaatggtcagattaaatgttccagagagttcaacgattacgcctgtggatacattgatgcctgcggtcagcaggaaaaactcccgcacctgggacgggagcgtgaagtccagcacgctttcttgattcccgatctgctcctccgtggcggcgggtttgatctcgtcagaggggtccagcacctttgccaacgccttggagaacttggggtatcggccaaataactccgggttattggccttgaattccttttgcttttccctctgcacccgctcctgctccttacagaaagcgtccagctccgccagataccgctcctggtagagattgctggcttcaaatgctgtgccgctcttttccagaatggcgatggctctcttttggctgccaaacaccgggacccactgaaaaccgtgtcggcagggcttcagtttcagaaattcaccccgactcagcagggcttccaactccgtctcatgttcgtcccaccagttccgccaactttctggtgtttcccgcccctcgaccaagtccaggagtttttctgtcaatgattctttgtccataggtgtccacgctctttctccgccatcacttccacattactcggtagcacaaagctcattcatttttggaatcagtattttatccatccactggcaaacaatctcaaaggtattgttaatcttttcttcatttcctatatcaagatatatttcattgtctctcaaactgtaaaacagtggttgtgtgttgatgtctggtttggcataaccataagggtcgtatggacgggtgttgattatatagcaaacctctatgcttatgctatcctttgtgttcccgccgaatgaggaaaacgcaatcatataggtgaaatttttactgtgcctcgtaagtgttttgtcggattttttatacttgaagcctaaatgcccgtacttcccttgcaacttggttccaagcatttgcattgcttcgttaaagttcattgtgccccctccattttctcatcgtaaaaataaatatagttcatttctccgtttcagagggcgcaggaatagatgctcatggccccgtaatcggtgtgcaggaccagcccgctttgggtaaaggcaaaattcacctgccgcaccacaaaggggtcgtcaatagaggccagcagttggccgctgccggtatcccacagctctatgggggagctgccacgatcctgctgaacggccatcagactgccccttgtccgcaccatacaggtgtctgaaaaatttagcccctgccggaccgaaaacgggaaaggattggcaatctcctctccggtctgggtcagatagaacctgccgcccaccgagaagcactggtcatccggagagaagaagggatgccagcccgcattggggatcacaactttttgggcggacttcagatcgaccagcacatactcaccctcggtgacacggtagaccgctttgctctgccggggagagagcatcccgaagcagtaataggcaaaattcggatcttttgacttcttacattttaccgtttcccgccacactttcgtgttgctgccaaaggcaaagacgacgatctcctcgcccgtgtaccacagggccaggtcgccactgacatccagcatggtcttcatgctgtttttcttgttggcaaagggcgtgacctcatgggtgcggagcgagaactgctggagaagatagctgttgttcagaagaagggtgtcattggagcagaggacctgctcataggtcatccgcttggcacccagagagaccgtttcaaggctctccccgctgccatcgaagtgatagagggtctcgtcctcaaaatctccgaccaccctcgtcaggaagaagtcatcccttgcgggagaggcggccaggggcatgaagccgttactgtccttaccgacaaaccgatggcaccgcgcctgcccaacagcggcatcccgattctgatagacaaatcctttccgcatctggcccatcatggcgctggcagccttgctcctgacctggaaagcggagtcgcacaggatctccttgaccttcccgccattcaagcaggttcggatggtatggccgtcaatttcaatccgccactgcttatttgtagtggggttgaggaaggttttttcaatcatggctttgactcctccctttgaatcaggatggtttttccctcggcgttgatgtcataaaggtcatccaaatggatatggaagccatccacacgagcggtttccgccatccccagagcggctttcgccaacaggagcagccccgcccggtttcccgttaactccaattcatttccatcggcatgggtggtaaaggagaggtaggcttccggttccactgggaggataggcagtagttcgtcattcagttgaatggtcagtgttctggttttcatcacttaccgaaatacctcccatcaatcccaccagaaataccagacggtggactgccacaggacatctgccaaggagccaatgcttccatcctcattctgatccagatctgggcagaagccatattgctccacagccacctccatagctctttccttggagatcggagttggaagttcaaactccaattcatcgtggctcatggcggcagggatggcaccatgctgctggaaccagtatttggccgcagccatcagctccggtgtgtcggggcagtcattccagtttccgaagggcaggtaggcgaagatctcccaaggattcttcaccgggatcttggccagaatgagcggataggtcatctcagtatcatcatcccagtagctggagaagcggtcattaggttctccgccctccatctcgcccaagacttcctcatcccagtccatatcgtcatcttcggcttcttccttgcgctggccggtcaattcctccaaaaccgtctttccgtccttgacgggggtagagagcatcttcttccggtactccgttacagctttgaggtcaaattcgtaaatgtctacatcattcttcgggtcggcgttcattaccagacattccaacagcgtttcatcatccgcctggataagcacgggaacaaagccctcccgtacccccagccgctgggcgtagctgtatgccgacatgatggggtcatcatctgccatggatgggaaataggtacactcgcagtccaaatactccatgatggcctgagccacctcggaaggctccagtgtgtcctcgtcgaagtcctgtccctgccagttagcaaagcgttcttcgatcacctctgccatagcctgatagtagtcctcgtcaaaggggatgaacaggtaggcttcatcttggaactcatcggagtgataccgctctgggccgaagaagcagagggcgttgtcgtcaacatcggcaggatagtagggactgtcgccctctccatagtaatagcccgcaaaggcacggccttgatgattgaacagcacagagaacagacagccgtccagctcatcccggataaactcccgcagatccacgctggcagaatcagccttgaccttttctacgacctctccgtactccgcaaggaattcttcacccatcaggtcgtgctccatgcaccagcgcaggtagatggccatgtggttataagcattgatggggtcaataggcagttccttttcctcgatgctctcgatgtgataggaagcatcgtccatctcaccgtcaaaatcatcattggaaagggtgccacgagtgatagcatcctggcgggtggggtttactacaaaactgatccccctcattttgttcagcagagcgtctgtatcatgttccagtttatagtccaactcgtcctcataaagcggaatgacctgatagaagttgacctcctcgccgcccggcagggtgcagacctcgctgccatcctccgtatcctggggaccgatcagggtagcagtacacagtttggtgttgtctgcaaatggttcccggttctccactgtatgaccatgtcccaaccaactgtcacagttgatgggcagacgggccaaggatttcagcaggcggatgggccagtaccacttttcgtctttcatggactcctgatccagcttccagtccgcaggcagcgcgatagccagctccgcccgctccagcttatattccaccagctcctccggcacattcatccggtgagcgcccatacccatggtgaccagggtgcaatagtcccgctcctcagtgggcggcaccatgcagatgtccacatggatgtctggagaaaccagctcgtggaacacattctcgaccttgccgaaatactgctggatgtgtccctcgacggcctccatctcctcctcggtgtagacctcgggaacaccggcttcttcatcctcgggcatttcgccgtccgggtcatcgccgtcatcgtcagggtcaccgtccgatgactcccaggagattttcagcgtcatctgctcctccggcagaccgacgccagggctgcgggtgatggtgtgcttatcatctgccgcaaaaccgatagtttctccatcgtggagttccacatcgttctccagcacataggacacaaggctggccaaaaagtcccgcaggtcgctcggcttggcatcggtgcccagcacctccatctcgtctttgccaaacacatccatgccgtaggtgtagccattcatgccattctcgtttctccacagaccgaaccagatccagttgaagatgggtagttcgccgtcctgcatcatgtcggcaaagccctcatagaaccggggttcaaacaccacgccgctggtgtagatgccggtggcatattcctgacggcagcaggcggcgaccaccttggtgtagagcttgcccttttccagcaggttttcctccttgcccagcaccgccaccatgatgtgggcacagtgctccttggcaaccttgacggcgtcctcccacatatagttgttctcggcattcagttccgcttcgccgttggggatgggataggtcgccaggctgacggcggcgaccatgtcgcccacttcgaacaccagcgcgtcatcgtccttctcctcgctggcatcgtattcatccacggcgatatcccacttttccttcatgtcccggatgaactgctctttatcccattctcccttggacaggaggacaaatccggtgaaaacgcctgtgtggtcactctcatcctcggcctctgcctcggcccgctttgcgatctctttctggcactcttgaatcaccgccggggcatccttgtcttcggggtccagttctgcccaccgctgggcgtaggggatagcctgttcctcctgcccatagagatactgatagccgtaggccatccgcatattccactccgccttgtcctggccttcctcccggacggactccagtacctcaatggcgcggcgcagggccttgtctcccttatagttaggagtaccctcgtcgtggtccccgatgatggcgtaattctccagcgcccgcgccatggcgtaggcaatgcgatagttccgccagtcctccgggatggcgttgagggcctggatgcagcgggtgtactcgtcctcgtcgttccactgctccagctgctggaagtattcttcttcgttctgcggggtgtaagggatataatccatgcccgccagcgtctcgtccagctcgggggcctgatcctcatcgtccggttcctcctcggacggtgtttttaggttcactgtgcccgcctcccggcggaaggtgtggaaactggcccaggggatatcgctgtcctcaaagaaatttttggccatctggagcgccgtctggatgtcccaggcgatgaaatccacatagccgcagtagaggccggtggctcctccagtgagagtgagtacctccggaccgtcgccggtggtgaacaattcctccagcttatcccggaagtcgaagatcttctgggttccttctttctcccgcagggtatccagagggtagcagaagaagcccgccaccgcgccgtcagcatggagatcgtccatgaagtcattgtcggcattcaggtagccgttgatgagcggcacacagcaggtggaaccggccattacatccagccgccagtcagcgtcggggtcttcattgggtttcatttcgtagccaagatagctctccagataggcttctggatcggtagagagttccagaccccgctccttcagagcgtcgggaagctgggacataagaatggacggctccgccctgggttcctccagcacatcaaagctgtctatgtatctcatgtggggaatctcgcccagcacttggtcggtgagggtggtgagcatccaccagacccggccttccgcctcccggagcatgggcagcagcttttcacagtaggcggagagggcgaagctgttttcgccctgctcctccagccagatctgcacatcatccccggagatgtcccatccatcctcggtacgcagaccgatgttctggaggggctgacggcccacaaggatgttccagtgctccagcacctccttgggggcgtgtttctggaagtagaccagctcaaacagcttgaccttatcaccctccggggtgaggatcagctcgtacttctcgccgttgaagcccatctcgaaggagatttcatcaaaggccagattcagggtttcctccatttgggccacgagttctgcaccgcgggtgtgatccttgtcgtcatccatcatctggcgcaattctgcttccatctcggcaaaggtttcccaccagttctctgtccgatcccggaagcactcccagaactgcggcagagaaataccctgcttgcaccggtcgataaactctttggtgtcatcgtcaccagggcggacttccaatgccttttcaaaatatcgcagagcccggccctcctgatccagataaaagtaggagtaacccatgcggaagttccagtaataatcgtcctcgaagtattcctcatggggctttagcagagcgagggcctttttgagcatttctttgcaagttggcttatgtgggtctgccagattgttataggcacgggctaactcactgtccatctcaggggtacgctcctcggcggggatggcctccagcgcatcaataattttatgttgtttgctctcctcatgccacttctggcactgcttcaaaatgtccatatcagggtcctcctcgtcctcatccggtttccagtctttgatctgctggaacacaccgttctcatcccgctcaaaggcgcagggggcgggggtgttcagcagagaaatgatgtcgggatcgtcgttgcaaattgtgttcagcttgtaaatcccggcattgttggggtcgtccatgtacgcctcgctctcgtcaccggcggtaaagcgccagccgctgtcccagccgccgtccggattctcccggtagcagtagccaaccttgtagccctccatcgtaatgcggttggtggcgatacagccatcggcgccctcccagtcggggagcagattcttcatgtcctctgcctttacatagtagtcccggttgcggccagcggcctcgtacagctccttccgcagcgcctccacatcccgagccatctcctggatctcctcgttatccatcatctcgctgaggtcgtattccagcggggcatggacaaagtccgccagggccttgttcatggcgtcatgctcctctggcgtagcagtgatgcggatacggcgggcgggggtgttgtactcgtccagatcctgaaggtttacactgccactgacgctgcactccagcaggatggcggccaggtcggtgaccacatcaatggcgaagtgaaagtccatctccacaccatcggaatgtgtaaactccaggtactccacggtttggcgaaagtcccagttctgcttgtccagaccgatcttggagaaaatctcgctgagggggatctcctcctttttctgatcctctaaaaatgccacaaggttcagactgtcatcggaaccgccaataaagttgccccagtattttttgatatacatttgtcgtgcctcctgttctgaatccagtcgatcaatgagctgattcaagtgttccaaccacgcaggagcgatctcaccgctatcctcgttcttccaaagatccataatctcacggatgccgtcctcgtccggcacctcgtttttgatgtcggtgagctgccgcagcaggaaagcaagtgcttctttggatgctgtgaaaccggtgactttatcccatatagcttcttcatgatcgtagtccagcttgccgttatccttccattggaaatacagctccgccagagccatcgcagtattgtcaaagagaaagtcgatttgtgagaagtcagatcccagcatgacttcctctttcatcagttcaatcatctcgcccagatccattaccggatgctccggtacatattcatttttgaggatgtccagtacatccagcccttcgtcacgctctaatgcttttataccccatgctcccatgtcggcacctctctttctttatttcgtatcaagcttctattgtcaatcatggttctccacccggataatgggccggtagaagtcataatctccgtttagttccttgtcctcctgcacttccggcttacagtggggcgaacagggtaggaaaccgagaaatgggcccagcccgccgcagatattgcacccgccgtcaccgccgcaggtggtaagtctatcagcctgcaccacttcccgcatatagggatcgtaggcgatggacaggccgaagaagttgggttcctccatatcatagggccggttctcatcctcatccatgtcctcaaaccagcgtagacgcatggagtagtctaacccatctccccatgggaacagggtccgacatccgccgccgcacaggtaggcccactcgtccgctgtgggcagcgaaagcccctgcttttccagcccggcaagaagcgcatcgtagtctgtgcagtgatagatccaggtatgaaatccatcttctgtccgttctatgcgggccgactgatgcaaggtaagactgctgctgtcactccaagcaaaatcacggaattccttcagccagtcagggtgggcagtcagcctgggatcgtccatcttgaccggctcccagcacagttcctccagctcccggcccaccagcatggggccaatgaccgcctgccgaacgggagccatgctttcccggatcatctcttccgggttctgcggttccatctcccactcctggaacagatagtccaattcctcccggctctcctgattcagtccctcggcaaactgctcccagcccagggtgacggtatcgccggggacaaagacgaactcccgaccatctttcttgaagatgccggtggtgcagctctggccccagtggtcaaaggtatgtagaccgagaaaggtcatagtataacgagcagccaggctttccatcagcgcctgcttctcggtggtatccatttgattgaattggggacgggacagtttttcgttcatggaaagtcctccttcgattcgttttgcgtgttccagcagatagctctgaccatcctgcttggcccattccaagtattgtggaagctggtcggaatggatggcatccagtgaaatcagaacggcgatccgctggtattcctgaagttcaggagagtaacagttgcgctcccaaaacagcggagcgaactgttccacacagtcaggacgcagagcaggcatcgccaaaagcgcccgccggctcacatattcattggggtcctttgcgaaatccagaattatatccctgactttctgactacatgagcattccggcagataggcggcaaactgccacttggcctcattctcattggaagctgcggccctgcggcagaggcactcaaaccattgtggatgggaagtggtctcctgtataaatccctccgcttcgttggccctggcaattaaatagaccatctcatccagtaggacgctgtctgccgtttctgcatccatttgggtcaacatatggcaaaaggcactgtaagtatcattccacgcagggtaatcgacctcccatgcaccgccgatctcctcggtggtttttccgggataagtgatttcctgccactgatgaaattttcctacctgctccagcaggcactccctgatgtcctttgccatacgcttacctcacaattctttgcacaggtttcccagttccaatgcctgttccacaaggcccaggagcaggctggaaaaattctcggcaatctcctccagatcggcatagtcacagttatagccccggactctgccgctctctaagtcgataaatacgatacttccgtcacccaatcctccgattggaaaggtggggccgtggtcatattcgctcatgtaatcctcataagcctcttgaaaaatcgggtaggcttcttccaactctttcagtgtgaagatccacggctccgccaaatagcagccgccgaagttcaaaagtagccagcggtactctgcggggatgggagtatacctgctttcaaatcgtttcacagcatcctctggttccgggaagataccctttgtgaaggggcttactttataagcagtttgaattttactgcggtatttttccaaattcatgtcatgcattgtgtttccctcacagagcatccagattttcctgtagatcgccctgcatcaagtgttgggcaatggcccggttcaattccttatgggggtgataagcggcctgctctacatcgtgcaggcactcctccatcagtgcctccggagaaatgccttcctgttttccataaaggtgaccgaaggcatagcacactgatttgagaaagccgaaaatatagtcgtgatttccacgcatactgggtaggtcattgaacgagcccatacctccgtatgcccgaaggtggtgggaaacctcccgccgctgggtccagtcctcaatatcccgctccagccagccgatccagtttttgaattccgggtggtctgtctgtaaaatcgaccgcagacagatcagagcctccgtataaatatcggtctgtttcataggccatcgccccccaaaatacctccatagagaacaccgtttttcccgaggaacagcatctggctgcgaagtaggctgcactgctccacagcgaccttgtttccgtcacaggtgggaatagcctcctgtttttgcccaagacgatcaccatgagcagtaaggaagtagaatttgtcccgttgctggtatccgccttgaaacaggaaggtattgccggacggggcaacagaaaaagctccgcttccttcgattggcagttcaaacacaaagtcctctttgaagttcgtccgcaccagccggaattcatcgtaataataaaaccacaggttttcttcttcgtccaggctgatggcgtagcagtcatagatggaatacttctcattcttccagagaggagttccatccgatgtccatgcaatcaggccgcaatcacccagaggttcatcccaaccgtaattaccaaatacaccttcatcaaagtagctggtaatgatggtgccatctttttttaccacgcagtcttgaatgccatcccccaggcagaaacgggacagcacagctccgtcccggctgacgatccaggcgttctggtcggggccgttttcccgataggcgcatcttgctcccagcaggaggaagtgttcacctgcaggccgcaaataatggaactggaacttcaagagaccaagaggaaacagcgtcgtttccagcacccgctgttccgcccaatccaactggatttccaccgcggtataggtggaaggaatgctgagccagtccttaccctgtgtttcggagggctgttccatgagaagatagacttttccatcccttgccgtgaaaaagtctgttacttctgtgccctccagatggttttcccggcgcagctggtccaggtcaatgatggagaacaacggcagattttttgcttttaaggatttgttcattgggactcctcctggttactttaacgctccatcataggtgtgagtttcccagatggactcaaattctgctttctctattacacaggcgtggaactcctcaccccagacatgggcgttcaactcatccacggtggggatcggtgtaatctcgatggcgccgtcgtaaaggtcagggatgttgcgggtgcggccatctgcaaagatgtcgatggagcggaggaccagccactcattttcggtatccacttcatagaggatgaccgctggctctccatccggtgcgccctcccaaaagagtttgatgtactcgatcattccatttccctcatttgaaccaatgccaccccgtcatggtgccggttacctcatctatctgtaccgcaatatcataattgccgcgacagcccagcaaagctgtaggatggtcgttttccagaatcaaatcataaaactcaaccgctatgtcttggaattccttcggaatctccagtgcagagaagaaatccactgattgagcattttggaaaaattcaatggccgttttactgcattttactataatccctgtttgagtggtcaactctttcatgctttcgcagcctcgctcatgttcagatacatccccatcgttttttcattgtcacaggccgcccggatcattttggacagtagcatcaaatcgtcgatgtattgggagtacacgcagaacacatcctcgtcggaatcaaagtgaaacagatccacgccgctgttattttcctcgaactcctggatcacgccccggacaagccgctcccaatccgcgctgctgcctgtcagtcccagccgtcggaatttctctgtccggaatccgtcgctgatctttagcagaagggagatcgcataggggtggtggggaatgagaaagaatggcgcgatctgctctggttttacccagattttgaagggcgggcgcggatcaggtatccagggcaagatttcccattcgtcatcccgacgatttccgtattggcaaaagtctttcatggctttgcctcctgtttgagtctctttctgcatttctcaatgtgggcctgtttggtggctatgatctccagcaccttctctggctttatccgcagcagaagcgcaatcttctcaacaggcatcccgtccgctgccagcatacagagaatttccttctgtgcggaggcttttccagcagcaaaaccagtatcatagtcgtgagacagcagggcaaagaattgctccggtgtcagagtggaaatcagttcctgctccccgtgatagatcctgctgcggagcatttccagttcataaagtttcatttctgccatgctgtactccaatcgtcaaatcggtctatgtaatcctccccatagcccatgcgccagccaatggagtatcgctcgatctcccggtgggccagccaaggggcggcatgattttcttatcttgtagtgccatattgttttcctcatttttctttcaggcttcgcatccgtttcatgatctgctcctgttttttcgcggttttacgctacctgctcaaaaatcccgcagctgttcaaactgctccagcagggcatctttctggagtgcatcgcctggcagggcatccaggatcccccgcagagccatgtaaatttcatcccgttcctcggtttcgataaagcccatcttgttgaaggtctgagtgtaggctgccaccgcctcaagtgcctgggcttgggcgtcctcgcccggctcagcggccagcttcatcagctgggaacgggtcttgcggtattgattggctgcctttttcgcagcggcggcagggatatgctccgcaccgtcccagccccggaagggattgtccaggttttgcgccagccactccggtttccgggccttagtgatccgcagatccattcccggcttgcttttccagagctgctttgccgcttttgccgccgtctccggcaggctggtcatccagaaccagcgaagctccggcacctgctccggggtggggatgtcagctgcgccgaagccgaacaggtcgaaggtggagaggttcgtcagttcccggaaccctcccacggcggagaagttccccaggtttcccggcgcgccccagagccgcagttccttcaggtggggatggacagcagccagcccggtcagatcaaagtccttcagctcgatgccatgcagcccccgtaagttcggcagttccgtgtgcgggcagtattccccgataaattggagggtcaagccgctgccatcttcggggcatggatggtacaggcgtccggccccttgttctgaaacaggagcagctccgttccctcacacagccacagctcctccagcccggtcatgtccagcatcagctttctgatgctggtgcctcgcagatcaagtgtcctctgaccgtggttcagcagggtcagctcactgataaagggattccccctcagaaactccagcagatccgggtgccaccgctggcagatgagttcggagaggcaaggcagcgcctttagttccagcgccgaattgaatggcgcgtactgatccatcacccgatgactgctgaccttcaccgggataccgccgatctccgtttgctcatcgctctccatggcctccttgaaggcccgccgccgctcctccgggatggcctgccaccggatctggagatacacatcatggccgtcactccagcctccgtaggagcagcagggctggtcggtgaagggcggcagagtccccaccagcgtgtactggggcgggacctccaccggcacccgcagcagatgaaggtcacgggaccagtacatgaagtccttgtagagcgggcggagctggggcagttcctccgccgtcagaggggcgtcacccacccagtccagggagaggaccaccgcccagggctgcttgctcaccgagtccggcggcgcaatataggccacctggcaggcggtgtagcgtttcagatattggttgtagactgtatagacctctccggcggtggctttcatggcaccacgctcctctcatcagttcttttccagatagaatccccatatgcagttggagaattctccagcggcaaagcggtggatctgcccgtcaatctccacctgccagacctcgaaggtatggtcttggtgatagatcgggtctttgacttttactcgcttgccggtggtttgccagtcgtagtcaaagatgttcacaccgaacaatttgcattgaccgtccggaccaaaggttttatattccaaagccatgtgatgcctcacaattccgagcgctgccagccgttcagccgctcctgcaccgcgtcgatcatccagccctcgcccacacgcttcatgaggaagcggcggtcaaagccggtatttttctctctggtgtagatgcagagcttgttcttggtgatctgctccgcgtcaaggaattcttcccctttgtaggtaccctgggcactgtatgagaggcccagaggccggtagcccgggcggggcttttcgctcacatacttttcccagattgccagcaggcggggcacagcctgggcatcttcaaatccagcctgctccatatactgctcccactccgtcatctcagcaaagaaagcggacagcaccctgcggcattcttccaccgcctgcttatccagctggacgggatttttggccttttcccgctggagctgggagaagtgttccatctgctccttggtgaattgcatatgggccaccggctcgatgcggttgttgccagcgatggccagcaggccctcataggtaacggcggtatggtcgatctggatgtgggagagcttggggatggaggccgcctggagcagaccggcatcatccagcccggtgcggttgagggtgagaaggtccagcttgcagccttgcaaggcgggcaggccgctgccgtggatggcggcgttgccgtccaacaaaagatagcgcagtttgggcatagcggagaaaacagggaaacaggcgtcggtgagggcgccgtcctccacgccgaaattgaccatgcttttgtgaccagcaaagggggcaagcagttcatcggtcacaggacagccttttacatgaaagccaaccagggtgtacctggccagccgctccatgatctctgcggtcagctccggggtctcaaatttcttttccctatccagggtcaggacgccgttttcccagtccgccgtccgcgcccgttttggccattccattactgttttcctccttacgcctgctccttgtagctggcttcaatgtcaatgaagcgcacatacacggcgcagacttcgccctttgcatcatagccgaagtagacgggatagtaaccgtcaccccagccagaggagaagatgggcaggttgcagtccgtgtccggcacggtccagttgagccagtcgccgcagtccccctgatatttggggtgggcttgggcgttttcctccagtaagtcgcagaacaggtcgttgtaggggtcgatgtccgggtcctcctccagccgcttggcccagtatgttttgaaagccgcctgggtctggatgtctgcaatacaccccattccggcatctacgccgaaaccgaagtagtcatcatctcccagtgccgcgtccagattctcgttgcccaccatgcccagttcatagcggacaggcttttcccggctgacctccaccttgacgcaggcgtagcggtcgccgtatttttcactgggcaccacgcagatctttaccgggtaagtcccggcggggatcgtttgaaggaacggcagagtgtcctccagctccaccagcggatcacaggcgaagatttgcccggtggggaaatggacggtgccgatgtccagcacatccaccgccatattcccaatcactttttctgtaaaatgggcctccaagtcaactttgcaggtcagtttatccttgatggattcgtatttgttcagccattcggtcgtaggcatatcagtttcctcctgttgattctgcttcttgatgtacacactctttgagccgtcccagtagcagttcacacaccggccatcctgaaaatgatggtcacaattcgggtagccgtagagaatatgggcacattccgggcacagccccatcatctgtgaggagcctttgaaaaacaggctgccgcactcatcacaaagggccagttctttttctgccatagggctcaccagtcccgttcccggatggcctcctcagtgtcaatggggatgccaaaccactccagaatgtaggccacggttgccgcaatacattcccgcgccaccgtttcgatctcgctgtcgttctcgtcaaattcctcctgaagatcgttgatgccgcagaccgcctcgtccagcgtttcctgcaccgcatcggtgtcggtttcgccgctctccaacaggtcgatgaccttctgaagctcgtcctttaccttgttcaccagaaaagcaggatagtaatcgtcctgatacatttcgtccagcagtttgtaattggggtcaaatgctttcatcgtgatttctcctttctcattcaaacatcaaaccgtatgattcagtcaggcttccatcgtcctcgtgaaatatacactggtacacaggctcacgctgggttgctttgcggaaccgctccagaaccggagccagcggctcaccggtagggatgccgagggcatcagacacccgccgtaagctgtccacatccatatcttccaagttacagttgcgctgtctctgcccatactcctccagtgttttggaatccacatactgctttgcgtcacagcagtcgtgccagcagatacagctcacaagcagggaaaagagatcatccatgctctcagccagacggccagcctccccttcgctgctgtaatatccaatggaaccatcttccaacaggtggtattctccgccggagccatctctggcaaaggccatgccgggcattgaaaaggtgcatcggccttccgcgtcatcccgcggggacaactcatccagcaggaagaagtcaaacagcgaatcaaattcatccgccaaatcagggttttcgtgcaatatcttcaaatagtccatagccgttttcctccgtttacggttcttgggtcatttcgtgcagccgttccagccacagcgtttcttcgatcatctcatcattctggtaaaaatggtctttgtcgcgggccagatgatcagcaagtggagccgcgtccagcggggtacataccacaaaactgtcccgatccgcccccttgatctcccggttgaggtagtacacccgcctggcatcgcgggaataccagtgcccaagcagttcccaggaagtcagctctgctttgggaagctgtttgccgtaggcatatatccgcttctcatctctggcaaaataggtatcgcccaaggagcggaaagaggacacctccgcgcccttgatgaccttcaccttgccgtctccgttgtggaagtagacctgccggctgtcctttgcatatccctggggcgcacccgaatcgttctggccgttgtccaacacctggaaagctgccagctctgcatctgagactctcccgctggtggtgtagacggctgttttgtccatcgcgtaggcatagtttaacacccgaaacgatgccgggtctgctccacgcaggcgaatcccgccgagaaagcaggccgcagaggatttgccccagtaatgccagcagcagaagtctttgggcgcaacctccttcaacaagccgttttcatataggccagagaaatagacggctccatcccgaaggaaaaattcgttgtccaccggctctgtgttggtgattggttgcagcgtttcttcctgctcggctgtgatgctcaactcgatatcatcgtcgctgtaaatcaagcagagcccatgaggagcctttctatcgaaatgcagttcaatgtcatggtatttgaggatcaaaggtttcccgtcgcttctcatggtggaaacggcatcgggattcccgaagatttctatgacctcatcctgcgatattccgaatttcagcggtgaaatgtcccgaggattctgcaatatttgattgcgccaaatagtaaagtcctgtttcatggttttccgtccagtgccccaacggttttcatagcggcggaatcaaatttgcactgccgcagttcccgttcaatcagggcaaacacatcggggaagcactcgatctcgtcctgatactcatatttcgcatacagtttcccgtactccgagatccagacctctgccgggtagtaatagccgatgtgaccgatgggctgacacttctgaccggcagcctgttcgatttccgccagctcacagccggacatatcccggaaataggcttcttccaaatggtttttgatcccgttgaccaggtaagggaacaaagcaaactcaaagtccgccgcccagttcagctttttctgcgccaggtaccactcgcagcacaggccgaaatatttgcgataaaaccgctgggtggtcttcatcatcgggacgccatgatcggcgtaatacttctccgcaatggagatgtccacttttcgcccttcctgccatccggcgtactccatcagctgcttgaccttgcttttgagatcgccggaaatggggatgcgttctttcgtcacggtggtcacctccattatttctcaagtggataataccaatcctccgggccattgtaactgacctcaaatgcttctgtatcaacattcagttctgatttggctgttcgataagctacagcggcgacctgtttcagaatgggggtagcctcctcccagtagacgcatgatgcttcatcttccaactcagaatcttcgtcttcctgttcctcctcaaaattcaaagaaaaggattcattttgaatctctgcgtagaatggaagttcaaagtccgcaggattggtaatccggatctctccagtgggagcatacatctcggccatactcagattgccggcctgaagatatttctggtattgctctgcttcgttcttgagataccgttccgaggaggcccggctgtcaaagtggacggcgcttaccccagaggcaaagtccgttgtcaggcttatagtgaacaccgtgtaatccggatgctccgctttcagctttttgatggcggtattcacaagggacagcatttcttcctggtaaagggccgcgttaaaattcgtgtccatgattgtgttctcccatccttctgtcaaagttcattcggatacccgatcttatccaggcccgccttgatttcttcccattcattgcgcttagggttcaacgcaatgaccagttcttttgtcaccggaaccccatcagcaagctggcgcacagtctccaaaggcaggtctgctgggtaaaaccactttccatactccacataggtctgtggatcgccatcgatcaggggaagcaggtctttggatgcgtcctcgccgtccatgggattgcagtaccaggtgatgccgtcttccgtccagacgcagaaggtacttttcatctttttgacttcacggctgcccatgagcttttgcaacgcagggggcatcccatccgtcaggtcttctattcggggaagttttttctcccagtcgtagagttcggaatccacaccgttgattacacagccttccggcgcaaacatgacgatcatgctctggtcactgccatcagtggcaaagaatgcctctttgccttttcgccatgcggggttgtatgtatagtggcggatgaagctccattcctcctccaccatgatgatgtccagagctgccagccctttgcagaagtttttcaggcgctccgcattgggaaggccagataaatcttttgtggaaatcatgtggttatcctcctgtctttcctcaccacagccggtcgatcttggtatatatcttactgggttctctgtccgtaaaactggtcaatgagtcagtgagttctgtaagcggcatcacattcaaaatatccagtgcataataccagatcccggtgtcccagtcccggaaccgcccattgcagacagctcgaccataatcaccaggaatcaaatccagtgctaactcattgaggggctgtttttgccctgtcttatcgtaggtatatcgctccggcatcgcaccaatatgccaatcatagcggtaatgcacctggattccagactcctgctgaatcagttcaaaagggtgaagccgcattgtgccattaggcttccattccatcagcctgcgacagtcccgatcaatccgaaatccatcgggcctctgtacgatagatgcaaagtgagtaggcaggccaaaggaatagtaagagaagaagtctttcggcagccgcatcgctctgggatactggttccgttgtgcggcggcgtttccgccccgacagtctttataccattgcaggcggatctgctgaaccagaagtgtgggcagatatttttctctttttcgttcctcagctttcatgagtaatacagaaaatctcctggttcaaatcaaagtagatcaccatcagctcgtcggtgatctccgggttgaaggacagatccataatgaaaacttgctgatccatctcgtcatccaccaggctgccaaaccgcttgagccgcaaaaagtccaccatctcagtaaaggacagcttggatgggtcggttcccggaaaaagatcagccgcaatatccgggcctacatcgtcccggtggaactccatgaaaaatgtcacaacgctatggtagcggctgtcctcgtccgccagcgccgctttgatggcggctttggccttctccgccaatttctccgcctcatccagcatttctcccaccgcatccatggcggtaggatcagctgtcagttctttctctacatcgaagagaaagggcagtcccgattcatcgggaaaggtgaagatttcctcgccaggggtatatgtaaaatcaatgcgtttacaattcagtttcatagatacacctcctcattggttttccagatggggtaatgggattggtgaatagaccactgtatctccgtcattatccatcttgagaatgatagcaaattccgctgtattgctgtcctgtccctttgggagaggaaagatcattggggggcaacgcagggcagcatggttcgtggtattattccaatcttccatggcagcagataaaatgacatcaatgtgtgccaataccttctcaatggaacccgctgagatgttgtaaaaagtggggtttttatgatactgctctgtgatgaagtttttataggtttgcactggcataaagcaaaattcccaatcaaggggatacaacccaagccaatactcatacagtttcataggcgtatccttacccctcaatgttggtagctttgaggccctttttcaaggaaccgtagaccgttaccgcatggtcggtgaacatctcgtcgcagtcaaaccaggcggtgaagctgccgccggaggtgacggacaggctcgtcatgctgatccgccgggccagttcttcctctgtgatggggtctgtttccggatcgcgggggttttcctcatcctgggaaagccagttgttagccagctcggtcaggttctttgccgcaagctcccgcatggctttgtcccaggtttcacagtcggccagcagcttcttggcggcactgcgggcgcgggtccaggagggcttgctttcagcattgacctccagagaaaggagcacatcctttccgcaccactggatttcgccctcgaaggtatcatagtccttgtccagcttcagctcacccagcacctggtcctggatcaccaccggcttgtggtactcgtccagaacggcttgaagttccggacagtcctcgtgggccttgaccacctgggagatacaccagggccatgccaccagatcttttgcccattcctctttcatccggcggatcttcaggcggcagatctgctcgttttgaaagcgttcccagcccttttcgctgttacgctcctcatcggtgaccggccactccagccgctcctctttggtgctgaccttgccggtgtcacaaaataccacgcccagcgtcacaacggtcatttcccaaaagtttcctttccagttatatccgcctccaatgcagcgattgatcagagcgaccacttcctgctcctcgggctcgtacatctcataaaattcttcaaacatagatcattctccttatcccgccgtttgattgcggtattccttctccagttgggtgtaccaccgtttcagcatggtttccagactggtctttccgttgcgatctgtaaaaacaagaaacttctgcatcagtctggggaatagatatttgcccgcttttgtcagatcctgattgagatagaccatccgaaggatacggccctgccgatccagagggttctttttcagcagttccttttcaaagcagaagcgcagaaacaccacattctcgtcgtagaagtcctccaccacagccgcgccaatgctggtgtatgtgatgtcgtacaccaaccggctccagtcaaatttctcggcatagagtagtttcagcgcctttgaccagtgttcctccgggatcaccagcatcctgtgctgggcggtactggagtagccacggtagacgggttccgggtgtcccagcagttcgctcacactgtcggcatagacgaagcacaactcctcgtcgaacaggccgccgataaagttaccattgcagtacagcatatagtttttggacttggccggagagtaagagaggttgtattcctgggagtccaggattttatgtactttgttcaaaaaatctattgatgtcatcggtttgctccttattcctcaaactcgccctcgatcattccgttcaaataccggccagggtctgcgatgaagtcgtcccatttggccagagggtggaactcctcgtgttcgatatccagataccacagctttttgtccctggggctccacagcagcaggtagtcactgtaattgtccatggccgccatgagggagagcagcttttttcgtttccaggtcatctcctgcacatccatgaaggagtagagctccgcccacttcacccattcctgctccggaaactccagccgaagggggccggttttcagatactccaccagcttggcgggcagcttatagggcatgagctgccgggctttttcctgttcgttgtgccagtcctccggctccagggcttttaagtagtcggccagctcctgatttttgttctgcactgccacggtgtaaggccggtcgccgtatttgtcagcaatggtgatgtcggctccttgctcaatgagccagcgaaccatagggaaattgttggagcgggcggcctcggtgactggggtggaggcgtaagggaacatcatgtccggcttgtggtaattgatatccgcccctttttccagcagcagtttggcaagctcggcctgtccatcggacacagcggcccggaatgcctcgccgccaaacttgtccacggtgatcccggcttgctccagcaccgggatattctccgctcgctgtccccagcgcacttcctggaaggcccgctctttctgcttcgggctgagttttgcggcctgtccagcaaagagcgccaccaccaccggcccacaacagcgggcagcggtgagcagcaggggttgttcctctgccagaccgggatcagctccatgctccagcaggaagtggatcatgggcacatcgttccgaaaaaccgcgatctccagcggcatcagtttgatgtattcgctgagctggatgggaacatctaaatccagaccgccttggagcagcgcttccagcttgggagtgtcatggtcgcagatggcagcagccgtttctgggagagtctcccagcggccaatatatgcaatttggtacataagacacctactttcgttgttgtttcacttgatagggaacggtccggcccagcacccggcccttgccaacggcattggctccctcatagattaagaactccgcattgttttccagcggagcgtagtcaatggtatctggatagaggggttgggcattccccaaagccggttcatcaaatgcacactcgtctccgtccagaaagcatacccccagatattccgtggttcctttgacgacaaaatggggacaatattttccactcatcagactggggggagtctttcgcttgccgctccagaagatgacctccacatagagcaccgcccggttttcatctgtcccgatcatgccagtcgctccattcctgcttaatcgccaaaccgctcggcggcatcctggtaaacggtgatgcttttggccaccttctttttctggcttcggatgcggaagtagtcccgtagaatgcgcttcagttccgggttttccaccttgcggggcagcaggctgatgaacatttcgtcgtagctttcgtacagaacaccactccggttgtaactttgccaagtcaccgtaggctttcgaccttcagggtctttggccagatcaaaaagccaccgctcatccagctccacatagcgttcaaacataaaggtcgtgtcataggacccgtagcggtcatggccccaaaagatgaacgcagtcattccatcaggccccaggcgttcataggtccagtcctccggataacagcggtaatccagcatccccagagcattgaacaggtagatttctttgggagtgcccagcaggagcgaataggtttcatacacctgttccttgggctgggtgataattgctttcataaagactggaatcagccaactgccgccatagcgttcatatagttcatcggccagtgcttgtagtcgtgtatccgggtttcgaatcaaggaggcggtcagaatcaaagccggaatcttctccatttcctttggctttactttatagagccccagtccttgggaaatgtgccatgtagtgcatttgtcaccatcataaaagggggtgtgcttgagatggccgatccgttccgcattttccgccagaaaacggtacacctccaacatcttgggggaggctttgcccagcatcaaatgaaaacagaaattcatctgttccacctgtccctcttccagcggttttgtatccgcctcatccaacagcagggagagggttttcaggatgactggggcaatctgctccgatacacaatccgagcaggcatccgacataatatggctgcccatccatttgcccttgaccagcttggcccacagtggggcagcaggggcatactccagctgcgccaaagccttctgagcagccgttttgcacttacccttttctgtattcacaagttggaacagcagttcgccgtttgcttcatccttgcccagctccaaaatggcctgttctctctttacgcccttgggaggcagttgttctaaaatcatcagagtattcatagtgtctcgtcctccttcataagttgtccctgcacctctttgggcaggtcattccacaaaatatcgtatgtaaaatcccgaatctccgggtaacactcccgtgcggtcttttccgcaatatctctattcaggtagtgcatctcttggtggaaaaaccagttgagtttttccatcagccgatagagtcggatctgttcttcttgagtcatggctttgatcctcctacttcaatttcagcacaaatccccagatactcactacaatcagaagaacgcccagcaggaagaaaaccacacgccggtatcctctgctgtggcggtgggcatcccgcgtaccagtggggtcgcagagccagttccagttgcggaccgctccaatcaaaatcacggccccgatgaccactgaggcaatgtaccaatgctcctgtaaaaaagctgtgatctgctcgctgttcatttaggtttcctcctcgccttcgtcgtcgcgtatcacctcataccacgctccgtcttctccgcgcatctgcatggtaccatagggcaggttcaggagcgggataatgtctggatcgatgcggcagatgtcccggatatcatagaagccgcagtgcgactcgtagtattcatcaccttcgccgtacacatcgccctcatccccggagtagaaggcccaaccgctctcccagcccatatcctcgcgctcggggaacagccggtccataatctgcaccttgcacccatcctgggcgacgcggtcggaagcgtagcaaaacagagggccgtcccagtcgggaatgacagccggtttcccttccgctgcccgcgccacccgcttctcggggtcatctgcaaattccgcttccagatactgttgataccgctcatccagcaactgctccacacgctgacggcttttttcagtgtatggtagaagcaggtaggccgcatctttttccgcaatactgttccagacacggtctttggactcggccaagacgatattccggcagtcccggcggtaaatatagggattggagcggttgtcctgagcgtaccactgagcaaagccagagcctctccggtcaaagaactgagtggacaatttcccatccagcttgttcaggatgaacgcccgcaggtccggcccctttccggcccaaaccgcctccaccacctcccgatgccgggagaggaatgggttactcatttggcctcgtttcatagcccagcccaggaagaaggccatccgattgtaggcatccaattcatctactggcaggtgaagcgcccggattttcttgatctgctctgcggcgttgtccatctccgccgggtcgtaactgattttctcccggtctgtgaccacattgagccggtgcggattgatgacctccaagctctcgtccgggcagaggtccagcagggcgtccgagccgtgctccaacttgtattggatctcctcccgatagaggggaatcacctgatagaagttgacttcgtccccgtccggcaggcggcagaaaaaggagtccgtcccaaacacaccaggacagagtaggatctcaccacgcagctccgtgttctccgcgaaggggatgccatcctcaccctcatccagtgtagtcctggattccagccctacctccgggtcctccatggcgaagtgggcggtggccagcatcatccggatgggccagctccaccgctcctcccgacagtccgcctttgtcagcttccagtctcggggcagattgatgagcagctccgcccgttccagtttttcctcccaacgctcctccgggaaacccatcctatgccggctcaggccgacagtgaccagagtgtagtagtcatgctccggccggggcgggatgatggcgatctccagcgggtgatctgggtcgctgtcgtccgtgaggagctgggtatagacaccgaactgctggtcgatatgtactttcacatggccgaggatgtcatcatcggcagggggaatggtctcctgccggatgatcttctcccgctcgttccaatccagttccaaggaattttcctcctccagatactcctcgcagtctcgcaccagcttttgggcgtctatgtcatccggggccaaggacagccagcgttttgcgtattcataagcggtggctgtggagccgtatgccatcaggcaggagtagcccatccgagcattccagtagggatcgttctcaccctgggtgcggacggactccagcagatcaatggcgtgccggagaagatctccatccacttcagcgttctcgccaagagcaccgcggtcactcagcaccgccagattgctgtaggctcggcccaattttagcgtcagcagataatcccgctcccgttctgggatggcttcgatagcctcaatgcatcgggcaaactcgtccgcatcattccacttctcaatctgctccagcagctctgctctttctgcctgattcatcgtttcaccgccttttctgtttcatcctttgccttttttgaagtgtccgctgcctcgccaggtgttgactacgcaggtgaatatctgaccgcagtgcttgcacctaatcatgtgagccataatttcgtctgcccatccatcctcagtctttaccttctccagcggacaggtggattcctctgcaatcagttcaaattcgccttgtcctaccaactgctggatataggcaatacaggccaggtagtcctttggggcatcaaattttctccatatttgaatgtttcggcagtgctcgcacataatggatgcctcctcctgtaaacggttgttgtcagccctgtatatcagcgtcaacggggccttttttcagcgttccatccacagtgatcacatggccccagaacatatcgtcgtcctcgtaccaggcggtaaaacggccgccgggagatactgtaaactcggtgagcaggatgcgccgggcgaactcatcttcggtgatggggtctttctccgcttcccggtcggtctggtcattgtccgccagccactcgttggcctgagcggtgagcttctgggcagccatcgcccgcagggacttgtcccacacctcctgatctgccaccagtttcttcatcacattggtgacacgggtccaggacgctttcttttcaatctccacatccaacgagatccggacttcttttcccatccacttacaggtcccctcgaatatgctcatctcacgatccagcgtgagggttcccagcacttcgtcctccagaagaatgggctttgtgtattccgcccaaatctcctccagtgccggacagggtacgccttcctccagtacctcagtgacataccactgaggttcgtagagggcatcacctttccagccgcgggctttgatccggtagatctggcccttggtaaaccgcttggaatagtcgccggcatcccgttccttgtccgtcagcggccagctcaggtagcatcgaccggagatcacctgtccggtctgggcatccgccatggcgagggcatgggtatgcgccgcccagtaggtatccagaaaggttttgtctgcgctgacaccgtcctggatcagtaccagtttttcctcatcttccggggcgtacagggcaataaagtccttgaccgttctctttttcatggcgttctccttacgcaaatacctgctggtatttctctttcagttccttgggcgccgtcttgatgaccttgctgccgccgttttcagaggctgtgccccagatggcccagagcacatcacgccacaggtaggccagcgcccttttgtcattgccggattcttccggcaggtaatattccagatgccctttgatctccatcagagcatccaggctctcctcattggcgatcagggtgcggaactcctttgcgggcttcagattctgcatggactggacaccgtggaccaacaccggcagggactgagcagtaaacccgtacttcttaaaaaaggtgtgaataaacttttcttgcaaagaggagtgctcgtcatcacagcgatccaggtaatcgcacaccagccgccaccacttcggcccttccagtcccagggcaaacacggcaaaggtgccaggcatggcgcaggactcatcagagaggttgttgtaccactcgtcctcctgcatggccagccgagcataattctccatccggacatggagacggggataccgcaccgcacaggcaaaaagctgatggacacccttcttgggcaggccggggatgggcaggtagatcttctccggtccgcgaaactcgatggagtagctgcgggggaactccggctgctccaaaatctcaatcagatagctgagagcctcctcacaggccccctcgccgcagtccctggcggtaatgcggatggtggcgaaagcgtcgttggccgaggcggtgaaatgctccgtcttacgccgctggatgtcctttggcaatttgccgctgccagctgttttcagctgcttcaccatgtcgggacggagctgggaaaccaggccgaggatgtgttcggttttaagatactcaaagctctgtccatacaccgtgcagcagaccgccacatagcaggcaaagcgcagcagctcttcatccgcatcctcggggcgcaattccggcagtaccgtgcagggcggaaagacggtaaagccatcatcccgctctcccacaaggaagtagcgttcctgtacctgcttttctatgtacttctccaatgtatagtggatctcctgccagcccaccagccgccgcatggcgtcgcagagagagacagcatcctcacagggaaatcctttcaacggcagctcggtcagataccgctccagcagctgatcagggagaaatggcgtcccgttgtggtttcgcaccacggtcgggtaggcggagtgattttcacgggcggtgccgttcagcacatcctgaatgcagagatccgcctccgccagtacttctggtgaagtgtccggtttatgtatcagataataacggtcatttacaccatcgcgctttggtaagctcatgcttgatcacctctgtttagacaataaaaaatccccgcgacaccctgtcacttggacaggctgacgcagggcatgaaaaggccgcaagggagacgccacatccaccagcggatgtggtttcttcttcagccaaaatcaatttttcatatttgaacagaacagccgtggactgtcccagtttttcttccatagcaagacctcgggttacaaatttctaaatgggtatactttactattttattatatcacatcatctgttttctttggaagagagatttgctcctcagccaaatttgtgatgtggatttttccctttctctttcctgtcccggcatactccagcagttctctggcattgctggccggatgccgcacataggcgatgagaaaatcgctgcgctccaccatatatcggtttgcgcggacgatggcaagccgtttggggaccgtttccagatccggcggatagaacagagcgtcgaacgcctctggcagatccacctttctgttgactgggtaatatggggtcatcagcatcagcgtaatatccgggtgcgctcgcttggcctgcgacagtgcccagatcaccagacggtcgaagttgccataccgccccaccacaaattcagatacgccatattccgtgatatggcgctctatggtttcaagcagggttgggtacacccgatctggtgtctccctatgccctataaagaagcagcttcccatctgacagccctcatacacagtcgcagtcatattttattgattgtgattcataatagaactataaagccaacgcccattttaataattatatcactaattattcgttgtgtgaagcgaaagttgatgatttaagtgcgaacccgcgacgctcccttatattaaaataataagtagagattggagggagaggatcatggacgataaccgccgctatgaagcgtttgtgcggaaccgcatcacagagctgcgggaacagaagggcgtttctgagcatcggatgagcctggagcttggaaagagcggctcctacatcagaagcatcaccaatggaatttctatgccctctctccgggagctgttcaacatcatggaatactttgatttgacgccaactcttttctttgctcctatggacgatccggattccctgcgtgggatcataggcaagaagctgcttgccctgccggatgaagacttggagaaagtagctgtttttctggactggatcagaaaataaccgctcctactggcgtttgacatgaaaaatatgccgctcagtcagttcctgatagtttctgacatgggcggtttcttttttgcgctcttgggggaaagaacttccggctattgaaatttcaagctctttccactaaaatggatttcatcgtctgttatcaaccgttccgattacaaagcgaggtaggaaaaaatgaaccaaaaagaaatcaatgagctgcggcgccgttttcgcccggaaaaaagcgccatcagccgtgtttatggatgctatgtcaacagcagtaaagagatcgtttccgatctggacgaatccctgggcatgatgccgcaggaggagtccgagaagtatttgagccttttgaagaagggactgtccggttccctggggaaaaacctcattgatatcgtattctccactcagcaggtagtggacagtgaggaacaccgcctgctcaccacactgcgggattcccagcttaaggacaacgaggcccgccagaccttttaccacaaggtaattgacagtctggacatgggggacagcagttacctgttgctcctgacctgtgacagctacgatgttccccatcggggcaaggatgattccctgcaagcggatgcctcggatgaggtgttcacctacatcgtctgtgttgtgtgccccatcaaggagggcaaggtagagttgggatattttcccggtgacaatgaattccactgtgctgccgggcaaaccgtcgctcctcctgagctgggttttctcttcccggcattcgatgaccgggcagcaaatatctataacgctctcttttacagcaggaaggccaatgaaattcaccaggagttcattgacgcgatcttccatgtggaagcgccgatgtctgccgttgagcagaaggaagcattccagtcagctctgagcgatgcgtttgactgcagtctggaagtgatgcagactgttcatgaacagctgcgtgagaaaatcaaggagcacagggagagcaggagttcggaacctctggagatgagtgcctcagaaatagggcaaatccttcaaagctgcgggattgcggatgaacaggtggcagcattccaggaaaactgcggcgagcagtttggttcgggggttgtcctgaatccggcaaacctgatcgacagcagccgctttgagatcaagacacctgagatcaccatttctgctgatccagagtatagttacctggtggaaactcaaattatcaacgggcgcaagtacctcctaatccctactgaagatggcgtggaggtcaacggttttgctgtcagcattacagctgcacagaaagacgattaaatttcaaaagccggacacaacgcaaggcggtataacctttaaggccagatattgtttgttattttctgtcttaaataaaatccttagagtgggcgcttctggttggttcattatgaaccgggactcggttcacatgatatgtagaccctccccttggcgggagggtctgctttttacaggctatctcaccagacggtttcttgcttccagtgctgatgcgcagtcatggcctgtcaaatactgtgccgcatccagccattcctgttcgctgcatgcacctaaagggatcgcggcagtgagcctgtgcagccgttcactttgctggaacagccgaagatcagaaagaattccgcatcccatttgataagccaaataatccagtagatcgatctcaaccagcattggacacctccgtcataccacatgatacagattggaagtaagactcccattctcccgccagcgtgggtccttttgcagcagaccagccctgcagagatcatccagtgcccgcttgaccgtagagcgggaaagccccaactccagagcaatggttctgatggccggccagcagcgtccctcgctgtctgcccgatccttgaggtacatatagacgctcttggctctgtggcttagattggaattgtagatatttctaaagctgttcattctgtttccctccgtcaaggccgaaataccgttttgcgggaatccggtgcggcctgaattccctgagccataccgccagcggatgtgccgcctccctgcggctgctcactatccattacaatcgtcccatagtggcggcggatgatggactcctccaactcctgtttgtcagcataggcaacgaaccgctgggccttctccggtacttcatagggcatgccgaaccggatgccccagtcaaggaacagccgcagtttgaccttcattgggtggacgccggtcttggccacaataaagctgcccttgggcatggacttaagttcatccggggtcatgaggggacgctccatcatctggagggactggctgggatcgttttttccgcgggagatactgccgctcattaccgtccggctgcccaaagatttggacagttccaccgcggtctgactggccggggcgaagccgccgtaaaggttgacctggcagttgtccacgatgatctcagagccctcttttccatagtttttctgcagctgtcccgtaatgctctggacgataggcaccagcatgagtcctctggaccgggaggcggaaaacatcagttccagcgactgaatgggcgggcaggtgcccaactcgtccgcgaagaagaccacccggttcttgagccggccgccgttctcgtcggccacagtgaggatctcccgatacaggttttggaggatcaggctgaccataaaatacttggtctggtcctcctcgggcagtacgataaagatggcggatttctcattgcaaaacttctccgcgtcaatggcggtgtcaaagcagaggatctgctccatctccgagtcgaggaaggcgtttaggcgggacagtaccgttgagattacggaggccatggcctgctccgccgtgttgagggcggacccggcaaaccagcgggccttatgattaggcgggagcttttccagcaggagctggaactgattctttcccttcacccggctgggggccagcagttcctgcaccaacttgaacaccgacacgatgtggcgcttttcaatgggattgccgtccgcgtcctcggtgggcaggtactcggccaccagcaggaacatggcagtcagaaggccctcggcggaatcgtagaaaaaagcattctgcccatactgggcgctgtcgccgccgctggtgttgatgagggtcttggcgaggatcttggagtatttctctgccttggcctttgccgccaggtttttggggtcggctttatagatatccatgtacttgttgatcagatgaagcaggttgttgccgtccgagcgggtgggattacgcagatccaacacggcgatttggtatccgtagcagtccttggcaataccggcataattgcggaacaggtcgcccttggtatccgtgcagaggaaggacatcccgctggcgagggcatattcgatgttggggtacaaaaagaacgcggtctttccggcgccgctggcggcggtgaccatggcgtggatgtcatcggtgtccaccagagctgtaacatggtctttgggcccttcgcagccaaggacaaggccctgcttttccggcagatgctctcccttgcgccacagctctggttcaaaagggacatgggcataggtctgccgaatctcctgtttggtagcccagcgtgcggttccgtgctggccgtcgcccacagtcttggatttgattccgtcaagggtatagtaatgggagagaaacgcgaggccgccgatcacgagaaacatgatggcgcctaccacgataagtgttataacttgcgttggcacatgatcctccttttgatatctacgccttaatatcagaaggggatgttcagttttcgctttgtctgctataataaattggtatgaggtgattgctttgatttgcgcatgtgaccattgctactatctgtttgaggcgccggaactgccggagcaatgcccggactgtggaaagcaggcaacccggccagccaataagcaggagcgggcagaatatctcagcagacaaacaagcagccaggaagatgcggaggagtgggactgagccattcctccgctttgctgtttcaggcttaggccatcactggctcagtttccctctgggtcttttcctctttctgccgccgtttgatctcgtcggcctcgtacttgaccggcaccttggcacaggagatggccagctccagccatgcgctggccacctcttttttctctgcctgggtacggataccctggcgattgttcttggccaatacgctttggaattgcatggcgatctcatccgcccggttcttgaggatactccggttctggtgaggcaggatgtggctttctaaaaaccggactccctgctcaacggtcagcgcggtacccatctgtttgcactcccgcagcaccaccgagagggacagcgccgccatggtttccatgtgctccatcgcctggtcaaagcgtccccaatgaaggtcgttccggtactgcaggagcaggccggggatttgataagccgcccggtccggctgaacttccttgcacctggtcccgattcgctggcagacgaggtctgccgccacaaactgcggatgctcctcggcgggctgtgcctccagtccatgccgtgctttcagatcctcgtcccagtctttgtattcggattgcagcggggcaatttgagaatagccatgctcccgcagaacatccgagagccggccgacggcctcaattccggcagcgtcgtggtccaggcagaggatggttttccgcagatttggatttttctccagcatccacagcatggcatgttccgccgtaccacagagagccacatagctgtgctgctgccagccgtccgggtacagggtgagaaaggcaagcagatcgatgggggcctcgaatacatagagacggtcgctggtaccgacccagtggaaactgcaccggggatcactgccctctatgttgccccggtagcttttgccttgggtatagagcccccgcttgtgggcatgacgggcaacgccgcgttcatcgaatccgacgaacacggcgttgtgatacacctttgtctgatctatggacaattcccggctctcatagatcagtcccttctgtgcgaaagcgcttagtacctcccggctgatgtgcctctgctggagcagataagcatatacccgccgcatggcctggtttgagggaggcagggcaaattcctttggcggctctttttcttttttctccgccggtatatacacctccccctgttcaccattgagcagacgggtcactgcttcagggtaagtcaggccgtagaaattttggacaaaggagattgcatggccacccctttctgcagcatgatcataccactcattcccatgcacagtaatactgtgatctgaggtgaggcgtttgtcctggccggaggagatgagtttctctccctgccggcgcaggaactccaccaggtcaacggagttggcacggagtttttggtcctctgtgaagtggatatatggcacgctacatccctccttatcaaaaaagagaccgcagtatgcggcctctcaaatctgtgttaattcattcggttggttggcatctttcggagctcttggacttgatcccaacgcccatagaccacagcgatagtgtgactggaaaggtgcctgaaagggtaactgaaaaagagaaaaagatttcagaacttcttgttgaagctccagaggctattaatgggagtccgcaggttcatacctcatatgcctctcactgattccttcccttgagtttccggtggaacagaacaggtctgcacgggattggcttttgccttttcagcccttgaatgccttttggctgcgccaataaaatctgctgtttaaactgcactttctgtttcaaaagattacctcccttatagctgcatttccggctcatggtcatccgccttgtggccctgagcgatcttcttcgccttgatttttcgtaggagcttccgatccaccgcgacccgaacgccaccggagggcggtggttggttttgctcctggaaaatgttggccagatggtggaacagcgaaatgacggccgccacaggaggctggcccaagcggtcatccatgtgtttcaggaaatattgagcatattcattgccctgatccgctgccagctggaaccacttgatcgcactggatctatcttttgggacctccttcccaagcagatagagcttgccgagggcatactgggcgtattgattgccctgttccgctgcggcggtgagccagcggatggcggctttcacatcctttggcgcatcttccccctggagcagcagcttgcccagccggtactgcgcaaactgattaccccggcctgctgaccgcttcagcagacttagtgcttttacgctgtctttgggtgcatcttctcctgtgagatagaccagagccagggcgtattccgcatacccgttctcctgtttggccgcggcagtaagccagcggatggcggttattacatcctttgggataccgtcgtctcccttcagcagcagttttcccaggcggtactgggcaaactggttcccaagttccgcagcgtatgtgagccatttcagtgcggccgccgggtctctgggcagggctgcgtcaccggcaagatacagcttgccaagagcaaaggcggcgaagctgttttccttcgttgccgcaagtgtgaacagagccaccgccttttgaatgtctttttccacgccctgaccatcccgatagattttgccgagcgcgtattgagcacagtcctggccggcttccgccgcctttgtcagccgctccaatgcctgggctgtctgctccggtgtagaggatggatcattgaaaatcatccgggccagttggtactgcgcgtggggattgtccagtttggacgcctgttcaaaccactccctggctgccgtctcatctttaccagtccctacaccatggaggagcatccatccgatgcggtactgcaatttatcgtcatggctctgctgttccaattcgagaaatccggcgaaggcttgccggtaccactgttccgacgcttcggcgtccttctcacagccaatgccgtcccgatacatctttcctaactcgtaggcggcataggggaagtcctgctgtgcggaggctgtgtataactccagcgcccgcgcatcgtcctgttccacaccctgtccacggcgaaacaggccggcaagggaatattgcgcatacttgtaccctttgtctgcggaaagttggaaccaccgggcggcatcaccatagtcctgctcacagccgaggcccgcggcatacagtttgccgatccggtactccgcatagcgttttttcttctgcctctcaacagcatagaaagcggccagcgccttgctgtaccacacatgggcggcctgcatatcaatcttccggcccagcccgtccgcaagcatccggcccagatcgtgcatggccagcgcattgcctttttgcgcctcctgttggaacagggtaaacgcctgctcaagatcctggggctgatccttgccgccaaacaaacagcggcgggccaggcggtactcatcgctccagttcatctgcgctttggctggcgcagacaccgttttgtctgggacatcgtccggtggggactccgagaaatcattccagtcattatcaggctggggcgcctccggcagcggcgcttcttcctggtcctccacagggacacggtcttgctggtcatctggatggaaaacctgctggcgcgcccccagtgttaccgcttcctcaatgacgatgtttttgatccgcttgaatgccttctgctgggaaaggggaaggcgtggaggcaggtcatccttgtaggtacgcagcacatcttcccgcagctcataccacagggcataggctgcggcgacacatggctctttggccagctcgtccacaatctcatccactacagccttcagcggagccttgaggtagccgtactgcttccggcctccggtgtgccgcaggcgttccgccagatgctccatgagcttctccatgcggtggttgaccacggcgccgctccacatctgttcaattaactgctccagcatagagcgggcatcctcattcagcgtgtccctactctgggtctgctgctggtaaagctctgtcagctcctgccggaagatctcttttgccagtcccgacttgatttgggcgatgccctgcgtggtgagaaagcctttcgacggatcggcgctgtagcagaccatgtggatatggggatggtgtgcttcatcatggaatgcagcgtaccaccgaaaatcctcccaggggatcttcatcgcctccgccatttccatggcatactcggagagcagtgctttccattcttccgccttatcatagccgagacgggcagcgtcttcccgccgcagagagatgatgggcagccacacattaccggggtgggccgcgaccgcttccgctacctgcgccagtacgagctgatcttcctcaccggtaaacaatccatgggaaccgacgcgctgggcgcgggggcgggtggcgatgtacttcagatagttatccttcttggcgatctggttatagttgtcctccagagcgcgagtgatgaactccgatgcgttggtgcgtgtcggctcggccgcatagtcctcgtattcaaacatcccacggctgagcgggaagtcccgcaggatctgttccaccatctttttctgctttgaggtggccggccactcactgcgtcccggatcgatgcgctccacaccattccgtgtggccatatatttcacatagttttcaagatgagcggtggcggaggaggtaccgcccttgatgtaggggcacttgaaaatcaggcgcggcacagactgtcaccacctttgtgcatcactccacgccccgctggtagtcgatggcgtccttgaagctgatgcgcccattggtctgcttcacttcacggacggaccgggcgcggagtgtcttgagatcctcgtcactgatttccatgcccgccgccagtacattcatcatcatgttgacctccaccgccagtttgaagagcaggcgggcgatgcggttctcactgtcctggacggttccgcgcatggctgccaccagtgcgggcggcagatatgctgtggcttccttgccggaaacatagccggcatagaagcggattgccttttcaataaactcgttctggctctggcagttatccctttcacagagttctttgaccagttgctgtgtttcgggagcaatacgcagagcgaacttgattttttctctcgccatactttcctccaatcaaaaatccctgacctttgcatggccagggattcgttttctttaagaggcttctttacttcaaagctgaatgccgcccatactttgcttttgtgcctccttttctgtccatatccctgttataatgccggataaacgccgaagtgatgggccattccagccgtggtgacccccggtgtgatcccatcccctgaaaagtgacccccgcaaaaccgttccccggcccgcattgcggggcggtgtgagccgagcgggggacgctttgcgacccccgctctttatcctgcactgttttcgacccctcggttcaccctcgctaaaggcgaaagtgagaggccatcaacgcaggacggtcactgctcattttaggaacggcccgcacaaagcccccacaaatcgccgggagggacggcaggggtacggatgccacccagccccggaaaagggcacaccgggccgcacagggggcaatggcgggggaatgcgctccacttcacaaaaagagccgtgctgccgcacggcttctcatggagcatcggctattggtttgctcagttctgtgtgcaggccatagacacctgggccccctcgttctctgtctggctcttgatgatccagtccgtcaggttctggcattcactcaattccctggccagtgcgtacatttcacggcggccatcggcgctgttcagcttcactgctgtctcgaacaagccccagatattatccagggtttggaggccgctggcgtttatcggcaggtctttttcctccatcacatgattcaccttttcgggctcggctgcttgggtaactgcgatttcttcctgacggatcaagtccagccaccgctgtgtgtctggtattggaagtccccatgccgttccaacctgtgtcacagcctttcgatatggagttacatccacagctgttccatagagcataaggtatgcaatggcctcctttgcgagattttcctgcagtttacatacttgtttggctttcattcgttgaactcctttcctcggatttttggtttgtttcaggcgccggttggctgcccatgcaacaacacaatgccacacttccggagagaaatccattcatcattgccaataaaaagcggcttgagaagctgtgggaagtcgataaaatttaccgagcggcgtttcctacagccgaatctccagcccttcttccgcctgctcccgcagcagggcggtccttgtttcccccaagctctgtccattctgttggtgacagtaggcgtccatctggttccacaactggacctgttccgcggaagtcagcgggtagaaaaactcaaactcatgaccgtcagagcagacgagacatacggtcaatgcgctgtctatccgcccggtcttccagccaaaattggcgtacacattcagccagtcatcgttgaaggcagaggcaacattggtaccaaatactgcgtcaggatcgaagtttatggggatatagaagttcagtttcccatcgcactctgtgatctcatcggtgaaggataccgcatctaccggcagccttttggtacctgcagtgagttccggaggggcttcacgctccatatccaactgtgcgtagtaatcgttcagcgttttcccggtcctgccgaggtagtccgcttccatctgttttcgcaaaagagcccgttcttcttttcccaggggataggtgaaaagtttctgtaccactccatcctggcgatgtagagtaagggaaagggtggcgtcggcctcctgccgtgcggcgtcgtaattgcagagaatatccagccagccccccggctctaaacagtccgccgccgggccaagaacctcccgctgggcctcatcgctggtgaagtcaaactgaaaattcagtccatggcctgacagaatgatctcctccgagaaggtaagatcgccctcccgcagaggtcggattcctctggtttcaatcgaaccaaaggtctgcaattcaatattccggccgtacagataatctacaagtctgcgccattgttcgtttctctggaggttgcgagttcggttggcgtggtaggcggccgtagatacatccttgtttttgaaggtctgccaaccgtctgcgagattcagcgcggaacaccagccggcatccagatcaatctcaaacgcacctgatactttgccagtattttcgaggcgcaaggcggccaattcatcaaaccgctcccgcgtaatgggctgtgtcttataaaagtggtgggagaaaccgcccttcaccgcctcggcgtctccttgcagataacggcgcagccgtatggccacatccagaaattcctcgccattacccgttgagaagatactgtcatggccattctcccgaatatgaaaagccgcatagactttctggtcttccgctgcctgtgctgactccagttcttcctttgtgatagctgtttcaatctgtacccaccgttctaatggaacagtttcgttgtacagcgttatcaaataatcctgcagatgccgtttaacattactgccttgcgccttcagcgcctcctccagcgccgcccagcgccgctgatccagccacgcctcggtagatacagaatcggccattattcaacccccttcttctcgtcaaaagtatccggcgcggcgcttcgaggggaccgggcaggccgcgggcggggctgttcctccggctccgccatgctttcaatatactccctggtctgagaaggcacatattttttgtagagcttctccatgaacatatccagttccaactctaaagaggtaccgttctttcccgcatagaactggacggctttgagtttttcctgctcaaatgaaaccgtgactgtggcttttttcatcgtgatccctccattacagaaacagttccatggcatgttctgccctggaactgttggcaagtgtttcatcgtattgtgccagaagctgtgaattgacgccgtccagaaccagttccactccataggggccggggcggatggcggcaatcttggcatccagaagagccgagaattcttctttgccctgggcggtcagacggggaaggtccgctgcgggcacccagccaacatcttcggcggcatgaactaaatagacatcatgatccggcagtccaagtgtcaacagatcccgcagatggacggccggggcttccgccagcgcatggagctgctgctcctgcacaggctctggtggaaaatacactctggtttcactgccatccctgcagaaataatcgacctttctccactcgccgccatgggcaacctgcaactccccaagatggctgtatctccagttccgattattttccttgcaccactggactacatggtcgctgacgctgccggacttccagtcgaaggtgaagagagtttcacccttctgccggagcagttccgtccactgtacccggtctgtgaagcccatacttcgggcaacaaacgcctcacacatccggatcgcccagtcggacggctctgcctgatgttcatgtttctttctgaactcctccaactgccaaagcagatccaactgatcctgtttaatattgatgtttctttcctcctctttcgtgtcatccttggactgtttatccagcgatagattgtttccaaaggcttccgtcaagctctcgtagatgctctccgtatcccattcgccagcggcagtcagccggccagcgatctcccgcagggtcgtttcctgggcaagcatctcatcgccggagataagccagggccacatcttcgaggtttcctgctcaaagcgaatgtagtccacgatgtcctggtatgcgtcatcgcagtcaggctcatagcggtgggcgagatcgaagcccatggcctcaatctcctgattagtcagtcccaactcattgtgaagcgtcttgtagagttcctcacttccgtcatgctccgcaaggaaagctatgagcctgttctggattctgttggcgcctgccgttggaaaatggtttgccagggcatccaagctctcccgcaggctgccggcccggtggtcatattccaaccgtattcgcccattgtccagatcaatgaccgcccgctgttccgcagccccgccatgaccaaggtcatggctcagggcctccgcttcatctgcaaatacccgcctgagtggagtgccgcgttcagcggcagcgagagaaagagcctccgcgaagctgctgttctcattttccgcgatggcagcggcccgcgctaacagtggatacagccccacaagcccagctccatcctcgcctacaaaagcggtttgccgtccccgttgctctacttgatacagcactgccgtagtatccctcccatcgttttattaccgtgttctgtctgttttacatagagagatcctgttcctcacccatctccacatcccacatggtccggacctcattcaggtaatacccagccagttctttgtcctcgcaaaagaaggggacgatgccgcggaccccatagtgctcctcaccaaccgctgggttgtaccgcccaagcacatagtgaagggggactttttccattgtgaaaaaagttccccgcacagagcaagtcttgtccttttcatccacgctctctattactccaccgcgtagatcgaaatcgccggggcctccatatggctcggtagcgacaaacagcaccttgtctccagccgtcagctccttagctaacaggcagtcccgcatacgggaaatgatttcatcacgggaggtgaagctctcggcctcctggatttcatcgctctccagttcgagagcggacagagcctgctggtacgcggtatgaagccgttcatccggcacatttgggtcaaggcagtaaccgaaagcccctggagccaggcgggtgattcgttcctcatctgggatctgttgtaattcttcataggcggaaagcagattcaccagcttccctgattttgggagaaggtcagactgcacctcagatgcttcgatctgctcgtccacatattcatcatacagagcgaagccgaggcatccaatttcatcgttgcagatttccaatgtgttatgaaggatatcgtagaggctgctgtcatcgaaatactctgccatatagttcagaatgcctgatatgatctcctccttccgctctgcggaaagagagggggcgggctgctccggcgccaggtttttgcagtagtccagataatagcagacatcaaagcactcgtccgtcagggtgacatccgccgcctccggccgctgctccagcttctcaaggagcatggtatcgaagccgttcccgtcctctatcaccaatcccatttgctcataaagctcactgaaataatagcaccagctaccctcgttggtgttttccgctccctccctgatgatcttttccactgcctgctccagaatggaatcaaccaccgctcttgctccgggcaagtaggcaaagtgtttccccccatcataggcaaaaactccgtctttatgcccctctcccaaaacgaggacgccctggtagatccgtctaccgtgttcatcagcatagaacggctctgcagcccagcggccatcctggtgagggccattcaaaaagtcttggaattcctcgtccggcagcgtaaccagccgaactgcctcacactcaaagatgtggaagcgtccggccttggccggcaattgaagtttcagccgcaaaatatcatcctccagtcttcggtaaataatagcggggattggtacgctccccattgacccgcacttcaaaatgcagatgcggacctgtagacctcccagtggaaccggagagggaaatgatatccccagcctccactgtctggccaacctgggccagtagacgggaattgtggccatacaaggtggatagtccattgccgtggtcgattatcacatagtaaccatagctgctgttatattgggaaactgtgaccgtcccaggcagtgcggcccggataggggtgcctgtgggtactgccagatctatcccggtgtgtccccgtgtctcgccagtgaaggggtcgctgcgatacccgaactccgaggtgaccacggactcccagcctgctccgatgggagagcagaagccatccaccccaatgaacgggacatcagccccagggaaccagccgccgctttccccgctggggctgccataaaggatgagatgatagatactgtcagcgttggcctgatggtccgcggtgacctcgactccaatggcatggctgatccgctcataaatttcagccaggtcttcaataggaacggccaccatgtaggtttctgtggtctccacctcattgccttcttcgtcggtggtggtaaccgttcgggttcgctcctcataatccacgaaacagtccgcaaactcatggatgccatctgtatctggctgttctgcggcgaaatacagagcataaaaaatggccttgacgcgggtatcgtcaaggctttttccatcttcgcattgactattgatctccgcgatcacttcgtccagttggtcaaagctgttccgcatatcctcgatgtatctttggtactccggcgtggcgctggcggaaatggagccgccgtggaagcacagctccacggcggacacattgtgctgtgaggttcctgagaggatggcgcaaagcagaaccaccagaacgatcagcggggaaaggatagccacaatgccccagcccacctttttgcgggcttcctcattggaaagaattactatcgccgctttgacggccgctgcaacggtggcactcataggttcatacctttcatgggcgaatcctctggctgcgtactgttctgcagttcagaccagtacgcggccagctcctccatggtttccgtgtacccatcgcctttgggccgatgctccgcccacagctggtactgctccagatcaattccccggtccagcaggagcttggcggctccgaccgcctgattgctgacacaggcatagagcgcgtcgtagttgtccggctccaccggcatcccgtgttccagcagtctctctgccatccactcctgatgctggcccgtgagggtgcgcaggatgccggccacctcatcgcccggtcggacgcccttgtccaccagatccaccgcggtctggaagtccagcttttccgcaacccagcggagaagcttcgggggcacagaagcaatctgctccggcgtgcattgggcgatcaggtctttggcgatgttccggcagttatttgtataggcatagaggatcacctcaccgtggagggaggggagcggctccgagaggcggccttctgattccttcaccaatgtttgtacccgccaactgtctcccgtttccaccgcccgcttacaggcagtgagatatgcctccggggaaaacctctccaccgccgcaagaagtatcagggtcatatttcctcccacgacaccggggcgtcccgccacctcgatcagcaggtcatccgtctggtctgataccctgggataaaggtttttgaaggcgtcaaattctccgtcccgaatggccaacacggttttatcgtagtcgctgatgtgcagggggtaccgtcccacctcatccatataggcggtgatgctcccggtcatccgccgcaggagctgttccgtctgggacatggcctgttcctggcgttcctgctgttccaccagcgcctcgatgatggtgcgctgctccgtaggattcaggtggacgatcatgccctccggctccgcccgctcaccctgacggagatgtcgggcataggtttcgccgtccccgtggaacgccttggtgatggcggaggagatgaggaacatccggtccagatctgcgccggtttcgcccagcgtcttgccggtgatgaaacttttggtgacggggcggctgtcttcataccacttcaggtacacatctaaatagacgccctcgttgccgccgtagtcggtggtacagaagatgtcggcgtctttggggatctcccggccattttcccattcccggtccatgagaaaatactcgtccggaagatatcccatactttccagacggtgcttcagttcctcgaagacttcctgtgcgacgcgctgaccggcatactgcatcctccggggatctcccggaaacggctcccactgctccaattcaatttttttcattcgaatttcctttctcttttatagatctgctgttggcagttcacccttcatacagcaggaacagggcagatcctcatctgagaaagcgcccggaatcgccagctgattttcatccgcgcagataaaatcccgccaggcccagttccggcccaacccccgcactgatgtgaggtttggcatggctgcgtcttcaatcgccaaagcccgccgcagcaaatccgggtagcggtggtacaatgtccgaatttcccaccgcttcatgctggggcagaagaagcaggaagacttgcccggcaggggaaggccggcatcccggatcgcctggatgcagtcctttcggctccagccccactccatcaggggatattccttctggtattttttatcctgaaggtcatgaggaagggcgttgagcagacggcgctcctctccggcatcgtatccaatgaacttgacgaccttttctcctttctcccaggcatcaatgcagggctggtagtgcctgcagaacttttcctgcggggcaaccttgtgcttgagggagcattttttgtacccataagcaatggagggcagcgttcctgagcggaggcactcctgctccagcgtcagcctctggccgttcttctcggtgtaccacacccgcgtgatcgccggcatcccatggttctccagccagcggctcatggtgtccaggtaggcataggtatgcggctgctcggctccgggatcggcaaaaaggatcaggtcgactgggacatggtgccgccacagtcctaccagcattgccgtgctgtccgttccgcctccatacccaaccacattcatcgcccgcccgctgtgccgaacagcgcctccttataggctggagcgtgaacctccaacagataccgctcgttgccgcatttgaacaggcacacaccccgttgggggaatcggatgaggttgtactccgcctcctccagctggagcagatccatataaaaccgcttgtcaatggagccgcagttgaagatgaactggtggggcgggatagcgaacaggggcttggtcaactcccggatgccctcccggtcaaagtcctccagattctgcgaggccatgatgaggttggattccttcttgcggacccgcttgagagtgttgcggatatactcgatgatggtggtacccaccgacacattatccgacagccacacatacagctcgtccagcgccgctgtggtgttgccgatggtcagcaggcggtcggacatataggacaggatgttgaacagcatggcgccgcgcacattcttgctggcctgcagcagccccttgaccccgaagacgataaagcgggaggaggtcacattggtgtgcccgttgaagaactgagcctcggcgccctggcacatggagtggaggcccagcaggatctcctgcagcagttccgctgtgtagagctggtggcagttcccatcgtactctctgtactcctgctcaatgagtttatagaggtcggaaaggatgggatagtcctggggcttgaggccggcgaagttggtgctgtcgctgatgccccatttggcgtacagcttgcccaccatgatctcaatggcgtcgatgtggcggtctgagaaatccttgtaggcccggaaaaagtccttgagaaaggagatgtgctgggagagccgggtggatttgcggaatgcctccggcgcgtccctgtcctccgggccactgccgtcatcccagcacttgggctccagcggattgatgcggtacacgccgcccatcagatccatgaagcagccgcccaccgtctcacacatatccttttgttcgtgttccacatccagggaaatcacggatttgcccgcctcgaggaagttgagcaggagcagtttgagcagatagctcttaccctggccggagttgccgaggatcaggatgttggcggaggtcttatcgtcatcccgcttatcaaaatctacgaggatattggccccgtacttgtccttgccgatgtagaatccgtgaggatcggtcttgccagaataattgaagggatacaggttggccaccgagctggccggaaggacccgttcaaattgggcgccgaaggcgttgcggccggctggcataacagaaacaaagccctcctgctgacggagcataagccggtccacattgagcttggagcgaaccagttcggtgagcacatcggtctggagcagcttgagggtgtcgtagtccggggcggtcagctccaggaacaccgcacagtggaggagcggctcccggttgcggtgcatggaggagaccagggtaaccacatcctgcaggttggcctcggcagtgacagtctgctggagatcctcggtgctggagcgggacattcggtgcttgttggcggcgttgtggatgatccggcgctcctcactgggggtgacctgccgggtgtagatgcggatggtgaccccgtccatctcgcccagatgccgcaggatggcctgctcatcggtagaagtggggtactcccgcagcgcccatacacagcggcaggtgttgccgcacaggtagtggtccaccttgaagtcgatgaccgagggggcgaccatgtcgaggaaatccttgatatatggttcctccaccacaggccggggagagttctttgttctgtttttcggcaatgaaaaaacctcctgtccaggccggcaggagatcttttatcgcactgtttcttcctgatatggcccggaagttctcctgacggccatatcaattaaattgtggggcacgggtcagtcattcagaatgatccagcgttccccgtcgtaatcctcatatttttccgtggtggcattctgctcaaaatacacgcccagcatgcgcttgagatcctcgccgctggcgaggcttgccttgaagccctgatcctcgaggcttttctggatgcgggagaggtgggtgtgcagctccatccctgtttcctcacgcaaccggaccagtatgaagaactcacgggcggtcgccatctggatctgtagacggtccagtgatttagcgtccgcctccagcagccggctgatgaccggcaggtcctcctcggcagcccgctggcgatagtgcctcttgttgtcctcaaagctctccttggagttgagggccaacatctcgatctcagcctgccccttgaggacggtcatgagggcatagatgcgattgctcacagcctccgggggctggaccgagaggttggtgggcttgatggcaaagaaaatcagcctcccatgactggtctttaggccgctgtcggtgatctcgtcgatcccgatgagctgccgggtagtctgtttggccgttgcttctttttttctgctcattttctatcactcctatccgttgatggattacacagcccccaggcataggtctgctggcccaggaggaaatatcggattgcatagcgcaggaagtccaagatactggtatcctccagccgaatcgagaggaaggcataggccgcagtgattaccactgggggcaggaagccaagttgggccatggcaaacacagagatcagggcgcccacgccaatgatagcgatgtcccgcagttcccacagccacagtacggctttggatttcagattatcgggataaatgtacatgtttcacctcacatcgtcatgctcattccaaacccctgttcatcctgatcggggccgaattcctgatcttgtacttcgtctgggctttgttccatcaaccaagattggagttcctgtgccaccaaccccacaacgaagactcgtttggatacgccattatgcgcctccacatactgctcaacgcggtggaaaagagattcgggcatagcaatggccagcgtccgttctttcttgttgtcctgaaggaccgcactctggagcggttcctcgccatgttcccactgatccagtgcctgattcaaaaggctctgaaccagtgccttttgggtgaggggcgcatgagcatccaggtaggacttcagccgctgaaacatgtcatctgagatctgaacggccagggtgcgctgttcctgctttgctgtggctggctggtccagataggtagtgagtatcttagtgagatactcaccgtttgtcatttcaggacttttgccctccatcagccgcttgtgaagcgactcgggaatcaagccgcagaggtttttcatcggttccatgatcgcatctcctattcataatcattcaagctatctgtgctgtggtcgcccatgcgattccttgcaaaacatagtcgacgcaaggaatcgctacactgttgcccagtgctttatagcgggcggagtcggaagcaccctcgatatcagtccaaccatccggaaatccctgcaggcgctcgcattccagcggggtcagacggcggatcagaagaaccgaggcacctcttggagcggaggcgctgttatctggctcgtccatatccacgaccaaatctgttgcgtctttgtgctgacgagcgctctgagtgctgaccacctcgttgcttttgaacacatccacacgctggcggctgaacacggcatggtgatctaatcccgaggattgagttatcccgagattaggcgtggcctgttcgcaaatgtgctggtttttcaatactttttgtgtgttgttcataaataacctccagataagaaaaatataaaaacacctctataatgtagttggcggcgaaagtcgactaactgcattcagaggtgtttttatgtccgatgaaattgtgtttgatgttctatgcacaaaagtgctggatgcattacgggctctggggcttggtaagttcagcatacgaaactactactacgaagggatgtggccaatcataaaggtctaccgttccgagggggtgatattttatagtgctgcatttacaaatgaaattgtgaatcgttttcacttggatcatgaaaatggtttggtagccgaccggatctgggcaaaagtcagaaaggcatccattctcttcgaggagtatgttcaaaccggaaaaatagtctggaaacgtgttagacctgatccgaaaatttccttagctccgtactatcatgaactcctgcgtagattctgtcaacatgaagcgaatacgcgggccattggatttgagagcttacgggacgaggagaatgtctgccgcaaattctttgcatacctcgatgccagcggttgccatacttgccaagatattaatttagtaaatgtcaacgcttttctgctgttcatcgcatctcaacgaaaatcgagcatggacagagtgtgcaacacattgaaacatctgagcgcatacttggtgtccatacaaaactgctgcgatttcagcgccgcattgactactcgtcccgcgccccgaaagaaactgcggcctgccttttccgcaaaagaggttcacaccgtcgtggatgcagcggcaaaaaatccgtccttatcgctccgcgatactgcgatgtttgctgttgccgccagtttgggactgagagctggggacattgttcgcttaacgctctcggacattgactggattcatcatgaaatacgcttcgtacagaacaaaaccggagtggaactgcaccttcctctcgaagcatcggtaggaaacgccattgcgaactatattcttcacgagcggcccaaaacgcagtccccagctctctttgtgcgttcccgtattccttttgacttcatgacttcgactgctacgggagaccggctcagaaaatatatgaaactctcagatgttgagtatactccgggcgatggaaaaggctttcacagtttcagaaggtatgttgccagttccatgataaaccaagaagtaccgatcgatacagtgaaagaaatcttagggcatacgcagattggctccatgaaagcatatatgcggatcagccgggacaagctcgcaatgtgtgcactcggacttgacggtattgaggttgtccaggaggctttgttatgagatctgcattcaccggggcatttgcaccctatatttgcggcttgattgaaaagaaacaagccctcggctatgactaccacggaagtgcgtgcattcttcgaacttttgatgaattctgccgtgagcaatttccgaacgagacctgcttgactgcggagttagccatgaaatgggctgaacagttcaagaccgagaaaaatctgtccagattgaatagggtatctgtgattcgggagctcgctaaatacatgaatagtgtaggagaacaggcttatcttttaccacttcaactcacgaagaaaagcggacgccatatcccctacatttattcaaaggaagatttgcccaagttgttcaaggaaatagattctctgcagcccagccttagagcacccacaaagcatctggtggtatctgtaatatttcgcttgatctactgttgcggtctcagacccgtagaagccagacggctccgaagagaggatgtcaacctgtttgatgggacggtgaatatccttgaatcgaaaggacataaagacagaatcgttgtcttgtccgaagatatgcttgaactgtgcaggaattatgacctgcgcgtagagaagatataccctcaccgcaaatatttcttccagagtccaagtgtccgaggtgacggaatgtactcaatggagtggattattccgacattcagaaggttccttcagacggcaggcatatccggatacggtgagatccggcccagactttatgacctgcggcatacatttgcaacacatcggctgtaccagtgggtaaaggaaggaaaagatataaatgcctgccttgcgtatttgagcgagtatatgggccattcaaatctcgagagcacggcatattatattcatcttcttccaacgctttataccgacttgccagaactgcgtcttgatagttcccttgaaatggaggcagatttatgcgactgaaagacgagaaattctataaaacggtaagggacttccttgacatctacttgatcaagcatagaggctatagcttaaatactcagaaatcgtatcgagaggcaataaatcttcttctcctttattttaaaacggaactggggcttgaatatgccagtattgggttcgaggacatcacttactcaaatataaccggttttctcgaatggctctcaaaatccagaggatgttctccagcaacggtaaatctgcgtttgatggcaattcgttctttcacaaaatatgcagggatattagattccggcaaaatctatatgcaggtcgaagtcggcaatatttctgttcggaaaactccgggaaaagtcgtggagtttctgacggctcctgcattggaaactctttttgagcagcccaaccgcttcaagacgaatggataccgtgacttctgctttatgcggttgatgtacgacaccgcagcacgttgccaggaactggtggatgcaaaaattcatgatttgagcattcgaaagactcatgcaacaatctgccttactggaaagggaaataaactgcgaatagttccaatctccccctctgtggttgaattgctcaaaacttatctggataaagcacatccgaccgagcaaaggcagagtgatgactatcttttctttacaacgcatcatggtcgcaaaagcagaatgtccaccgatgccgttaatctctttatgaaaaaatatggtgaaatggcaaggcgggcttgtcctgaagtgccagaacgagtacatccacaccaacttaggcattcccgtgccatgcatctgtatcgtgccgggatgccgcttgtcctcctcgcggagttccttgggcatgccgacgtcaacacaacccggatctatgcatgggccgatactgagatgaagcggcaggcaattcaaaaggtatccaaggtcacagagggagatactattgaaccaatatgggcaaacgatgaggagttgataaagcgcctttatggtttggcttgattttaccacattttaatcgtgttcacaatgcggcgaccagatcatagctggtcgccgcaaatttattatccggaggttttaacatgaattacagcagcaaaaacactatctcgcaacaaaaagccgatggccaatcttactccctcgggataactcaatcctcgggattagatcacttatctggatatccagataagtgatcggtggcggtgagagtataggcgatgccctgttgatacccaatcccgttcccgccgttcataggctgccggtcaatggcatttccggtgatacagaatatcgtgtccggttctgcgaccagcgggacattgttcccacccgtaccgtaacgggctgacattgtgggcgccacagaatgtgggccggtgtagcgggcatcgatcccgtggttctcgaatacaagtggctggtggccatgctcctgtgcccgaagtgttccggcaacattttcgctgcaggcaatggcgcttccgccctggtcattaaggcacaggatggatggcatacagttcccgctggcggttcctttcaaggtaggcgagacttcctctccatagccaatactgcccgcagaagcaccagctccagcagaaaaagcagctgtaaaaatggcgggatacccttgtccgggcataccgccgcctccgcttagtgctgtgtgccgctcctcggaaaggaagcaatcaccgttgcctttggccgtgattccggccacaaaggtctgctgtttcatccctggctgggcggtcagcgccgcggctacatcatgaagatcccgcacctcgtcccgctgattggcggcaaaggcggtgagcacaccgtttcgtccagtggacataccacaattaacaccgagagtggctgccttttctcctgtcaggtctccgttgtatccgtcgaatccgatggggccagtcccgcctggaggatcagagcatcccggagctgaggcggcagttccttgcctctggcctccgctcgacgcagaatacccaggcaggcggttttgctcaaatagtatttgcggggcggatcgtcctgcaaaatctgcgacaaggaagattctcttgcgacgctgggcgacaccccagaattgagctaatgtatagcagaaaataatgtaaagtcacctcctgaagtgtagtaaagccagcaagaatgctcctgctggctttacattattctgtgaaattatttagttggaatatagagctgagtcaaccattgcatcaaattttcgtcatctgtccaagagggctgctggtcactaagctgctgcggatgcacttgctccaacagcttttgcttcattttaatgttcagccgggcatacacctcggtagttttaatgtcagaatgccctaacaggtcttttatatattgcaaatccacaccggcctctaaccaatgcatcgctcggctgtgtctgaatacatgaggatggacccgcactgggaacaaatcaggcttctccttttgtgcaagggaaacatatttctgtatgatgtagtagacaccgcctcgtgttagaggggccttgcttctgttgcaaaaaagcggggcatctatatcacattggcgatattgggattcctcagccagataatccttcaagatctttgcaggtacaggaagaactggtatatctcggaactttcttcccttacctttcagatgtacaacggcccattttttatcaaaacggatatcaccaaagcgaaggttagcgatttcagatgcacgagcagcagattcatagattaaggtcaagaaggcaaagtcacgccgtccctcacgcgttgtaaggttcggctgtccaaaaatagtttggatggcttcttccgaaagatgcgggacaaccctttgctcacatttcttcggaggaatttcccggatctgttggcatagcagtacaaagcctggatcttcatactgcaggaacttaaaaaacgcattgattgctgctcgccgttggttccttgtcgtaatagagttacctttctcctgttccagccaccgaaaaaaagcatcaattagctctctattgaaatcgctaacttccagcctatctcttcgaattttgcgttcccgttcacagaaatccagtagcaaggacattgcgtctcgataggattgaattgtttcttggcttagtcccctttcagatggtaaatactcaaagaaatatcttgataacgctttggcaaaaaaagtcggtccacgattagccatcctgcaatccctctctttccatggcaaggtcaaacggagcatacatgccgcccaaattctgttcacaaatatccatgatatgggggaaggattgtgcggtcaggcggagatagtactgggtggaactaatcgatgtatgcccaacataacgggaaagaatcagtagattgctgtatattgggagtccagcttcagcccatttttggatattatggcagcaaaatgtatgacggagatcatgcacgcgcggcccaaattgcttccctttatatggaatccccacatcccacaaaatgccgcgaaagaactttccaatggtggattttgtataaggggtcccgccctttgcataaaagaacggcgttgattcgacagtgtttttatgaacagcctgcgcatattttctacattcttccgtcaatgtggcagacattgggacaatcctctcgcggtcattctttccgtgccgtatgtgcaaaattccgtctttcaaatccacatcgttttttagtaacgccaacgcttcagaaattcgaaggccacagccatagagtacgcgaaataagagtggcatagtaagatgtcggttaggggataggttagtcggagaaagtgagtcaagtcgttcaaaaatgagatgtaactcatccgttgaaaaaatatagggtacgtgttgttctccgcatttgggaagggctggaagcaggtaggatggataaccttgtttgcacaggtattgggcaaacctctgcatttcactcactcggctatatcgggtggcgtccgcctcatttgggcgcttcttgcaccatgtcaatgcaatctctttcgtaattgtgtaactctgaatctcataatctttacaaaaattatcaaatagccgcagcagtttggcctgctggttatagtccagaccagatgcccttttttgtgccacataggattcgcatattggagcaaatggtcctgtaaagaagggcttcttactcatagaagcacctccaatgcacatcgtctcagcatttctgtattgaggctaacgtatacctgtgtgctttccggtgtggcatgacccagcgtttgcgcaatgtcagttaattctgctccattattcagcatggaggtagcgacactgtgtcggaagctgtgcatcccaatcggtttatccgtagagacatgaatacctgctttagaaacgagtttggaaaccaacctttgcatagaaccgctcatgacatcaaacggtgcaaggtgccggacaaatatacatggacagtctgtctctgggcggccatgctggaggtaatcaatgattgcccagcccacatcttcgagcaatggaagttctaagggtatcccggttttttgttgatgaattgaaattcgcttgtttttccagtcaatattctcgaatcgaagcaatcgcacgtcactgatgcgcagccccagccgggtaaccaacaacaggatcgcatagttccgcttccccaacggattggatcggtctacctgagtcagaatgcactctacctcatccggtgaaaaaacagtaggcaggcgatacttatgcgtccgtctgatacagggcaaagcattggcgtaactgatataatggtagcctttggccaatgcgtaatcaaacagcttgcctaagatgcgaattgttgccgcaaccgtaccgggagaaaatccagtcaaagattcaatataagtatttacatggtgcagctcaagcaggtggaaatgctcaatgccggactccagcagaaaatactcaaagcgaaatagcctgctccgccaagttctgatagaaccttcagccacttggttttggcgcaaactgtccaaaaagccttcaaatagctccttataggctggagaaaagcccttcaaggtgatacttgattgcttaaagaccatcccatactgtaaataatcgtccaacatatgaatagcccggctgacattctgagatatatccctatcgccaagatcggcaccataccgttcccagacaaatctccgctctaaatccacggtgaactcagttgtctgatgcgcttcgcagtatacaatcaactccttccatgtcgcgtctaaccttaaaatcgtgctttcactgtagccgagttcagctaagtgtgactttaacttgctgatcgttttcctgagccattcgctcaatgagcctgtgtgctctatcgtcattagcatattcctcctattagttgatatggcaatgccattgtttaaattatacggaattatgttaagtgtgacgatgattttttctgatttttcatcagttttaggaggtgactatacattattttcaactatacattaagcaaattatgttcagctgaacataattgagcatccatgactctccaagccaggctgaattgatttcccagaatgattgccccagcagattcccagcgcccggagtcaggtcgaggcactgaacaggagccgtctttaattcggacaatctcctcgaggacgatgcggaaatcttcgccgcccgctgaactgaatgatcctggtacattctcccagcacatatatcgaggtcgaacagtgtgagctgttctgccgcgccgctcatctgcatccctcatttcttttacaacgcggatctgctccataaacaggccggaacgctctccggcaagaccggctctggcccccgccacgctgagatcctgacaagggctgcctcctgtgataatgtctaccgggggaagttcggcaccattcagtttcgtgatgtccccgacatggagtatggaggggaacctctttcttgtcacttcgatggggaaggcttcgatctcgctggcccacaccggctcgatgccgttgcggaccgccgcgagtgggaaccctccgattccatcgaacaggctgcccagcgtgggcattatgccatacccatgctctgccctggagcttcgctttgctccatctcagcgggcagagcctcctgcttgatttccagctccccaatctgtcggatggggatgccgagccgttgggcctcctcaatctcacgggccatgccggaactgaccctgccgccgcagagccacagttcatcgcagacttccagcacccggtgtcccagccgcagtccaatttcccgttctgttggctcagcgtcatccaacatctgtgggtagagcaggtggacggcgatgggcgtatgcccctgatggatggcataccagcacgcctttttcgcaaacgcggtgtttgtctcaatatctcctgcatagggagaggcgatgtaaatcagtttttctctgctcatttcgccgcccccactgcctgtaccacggtgcgggtggtgttgaccgctgactgtgctgcatagacggcggacatgatgttggcgcgtgtcgaggtgtccagcccaaaggcgccgcagatgcggggcacttcaccggccgacagcatcaggccaaggcccagcagcgcatgatccttcagcaccagcagtcccgctgtaaggatggtggcctgcaggaaggtggtcagacacagaccgatgatctgcttgcaccactgcacaaaaccgtccatatagccgcggggcaccgagaacatatacagggaacccacagcaatctggatgagtaagactcctccgcgcttgaggttggagaaaaagcacttgatgacggcgtaccccatcatgatgataataaaaattaccatgatggggctggtgatgctgccaatcccgccgaatacgccggaggaggccgcggccccgatatccacgccctgcagggagttgatgatatcagtggaaagggcatcaaagctctcgccatacccggtaattccagaggtcaggctggcctgcagcgtgacggagagtttataaagttccaccggcaccagggtaaaacaccccacggccataaagcccttgacggcgctgatagccgcgtccttgatactggcccgtccggtctggtattcgattccgacctcgaacacggccaccaccagcccgacgacatacagcgtccaggccagataagaaaaaaagagaacaatggactgtacccagctcatctcgaagagctcgacgcccatgttccccatctcggcaaaaaagttgccaaagaaaccaacaagctggctgtagacccagtcgataaactgatccatcagcccgccaaggaaaaagtccaatataaacatctggtggtttcacccctttgcgtaagggggaccgtgccagcattggacgcatactcctgctcaaaggcacaggggccgtggctgggcacggcccctgcttgtattcgcttcctattttcttagcacatttgcgggctgtgttcctgcgcctcctcctgacgctggaacacctgcagatattcgtccaccgtacccgccagcagcctgtaatccgcctgagtaggctggtaaacataccagtctaccttcccataatcgtcccagaggtgtggtaagataccatccgagaagttgggattgctcacttttttctttcccagtaaatcgccaaagcgtaggatattcacatccaccgcgccctcggtccggttcaggatcgtcagcttgagggcattgtactggccggcaatgttcagagaaacaaactccagcctggcccgcaaatccgggtcaagctggatataggcggatctgcccgcataagacacaacgccgctggttttgcactgagtgaggattttcctcaactcctgtccaaatggattcaattttcttctttccctccctacatggttaattccgggacagtcggcgccggtggatgagctaactccagcgtactgccttccaaggccagaacgccatccagccggtgaataaggccctccatgtgtttctgccatccgtcccaatccttcggatcaaaccagccgccgggcagctcgccggctttgatctgccgctccgctctgatcctggcgtatttcaaagtgtccgcaaggtaatcccggagttcccggagagaagcccttgatgctgtaaacgaggtgacggaccggaacttgttgtcctcggccgcccactcctcatcatagtccaaactgccgggatcaccgtcaagatactttacaacgatctcagccagtgccatagggctggtatgcgcacaccccagctttacatcacagggggcattccatcggtctttctttaatcgttcaagcatttctcccaagtccagttgtccatctgccggtaaattgtaccggacacatctaaccgcatccagtccattgtcggactccagtgcggtgattccccaacagcccatagaaaccgtctcccatttccggcttacgcctcatcattcttgtcctacatttccagtttcggtccaatctgctcctgctcatccagcccaaatgcctcgcgcatttccgcatccgccagaatcccgaacgcttcctgacaatctgcgcagctcacgatccaggtctttccttcaaagtaccggagcatttccgccaatattctggtcttcgggtccgaggcagagagaagctgccccacctcctcccgcgaaagatatttgcgttctccgctccaggagccaatcacgccgacagtgtactcagggatttcctccggcagtattttacaatccagaaccggatctggatcaaaggtgaaaaacacatcaatgggagtatcttctaccacgcttaccccgatgccgtatggacctgcacctgctctgcacatcccggtagaccgctggtacagctcgttaaccaatgaaagcattttatttccggatggatttggaattggatattccattgcttccttcctcctgtattctcagaataattctttacattcccaggatcgtccagacataggtgggagccgtcagggtgaagataaggcaggcaaacaggatggccggcgcagtccattcgaactggccgtgctttctatagtcaaaatacgccatgcccaatttggcgaagaagaacacagccagaacaaggtcaatcacgggaaagaccacattattgacaaccgttttgatctgggcggatgcgtccgtccaagtgccttcaatggcaccagccacatccccggttcctgccgcaaatgcgggtaccgtaaacatgatggccagcatcattaccattacgaccgcacagagcatctttttcgttttcatcatcaaataccacctttctttgctgaaaaaagaaaggccgcaggggtgttcccgcggatggatgatctatcccgaacaggccgcgaggcactttcccacggcccgtttcttttctgattttgttactgtgaatgcttacatcgtgagcacaggtccactcagttcctgtgtttccaggaactgagcccggattatttcttcaaacgcttcctttgctaacctacagaagacagagtacataggcagaccgttctcagccgtgtattcatacggttcaggtaaccgcccgcattttgcaaaaaagttcttttccgcctccataagccgctcaatagaccactcacgtacttcgttccgatatgccaagacggtttgaacatggcgctcatctcttgcggagagaagcgtggggtaacgaagttcagcatactcttgggcggtcgtgtccatatagcgttcaaatgttctgcgtgtcggcagcccatattgaggcttcatttcccttgccactggcagccttctgttcttttctacaaatcccgcaaaggcttcttcgattttctccttggtccatactgccggaagcccttttttgcacattgtcaaccgcctctttacatcaagaaagaaatatctaaaaactgcgtttgagcagcctcgaccagtggggctacttcaatgacctctggattctgttggaacttcaaatctccccggaagcccagtttcaggttactgaatgtttcggcggccttcagcagttcgggcggcgatcctggaggcatctcctgcatccactgtacccattcacctttctgaaagcggggatttagccgaaggatcacatagtcctccggcacaaacttgggatagcggccgatgctgccgcccaccttatagtagggctttccctccatcatgaccgtggcccgcatgagcgtcagggtatcctccaaagaggcgcaaaaccagcactccctatcgcccatacgcctgattcggccatcccgcaggatgctgtccagattctttcggtgcgtgtagtggtagacctcgccaggctgctcatccagtcggatgtatcccatggcttcacctcccgcctatagatcaagcggagcgatatgccaatcgtcccatagattgccccggatattcagtgaatcggtgaggttgaccgagagcatccctgccggggtccagcagtcaatgacccaggtgttgactgtataggagccatccgggtaccagataggagtgaaatgggtacgccggttataggtgctatactcgttcttctggaactccagcctggaagacgaggaactgatggaaatgcgatccaatagccgccaaaaggattcatagttgaactctgggaagtaactgactgcattctgcagggcggtggtagccgacctctgggaactgttcactctggcggtgaccacctgattgaccccatagccggacttcatggtgctgtcgctggcggtgggattcttctcgtctggagtaatttccatagcagcggaaaggctggcactgtagcggtccagatcaaattcccaccagccgtggtcgcaccagtatccgtcctcatcatcgccatgccatacccaatactcctgccaccatgggtcccaaatggtccactgggccgaggttttctccggccggtctgggaccggggagggtgtgaaggagtcgttccggtcatctgctactggattgggcggcggattctcgtccagatctacgatcttacagtggatggtggcctgtgctgatcctgggccggatacatccacatcgatggtcatgtcctgcggctcgtccggtgtagtccagcgtacccaggccaattgggaatctccgtccgggtagtagacattgctgaccgtataggtcgtcccatcaatatggaactgtacagtgaccggatcatccgggtcactttggccaccgctgacctctaccgccgtgatgacctcggtattggttcggtattcatagtcataggtgctgatctccggctcctccggctgctcctcaaagcggacgataccaagcccaagggaggacttgatgtccgagttggacacattcttattggtggggccggaccatgcgggatagcctaaatctggggtttccagaaacatggacaggggaaggtttttggccgtcagcgatcccatccaatagcggagttgtcctccaaccacctcgtcataaagggcggcctctgtcgctgttgtggcaatcatgacaccttggaacttataataggcgatgggttccagcagaattttgtattcgccgctgatgagcgtgtcataatccataccagtttcttccgcaatgaacttgacaacatattctgaacaaaaatactttttgatggcctcgatgttattacgcccgtttgtacttatgatgcgaggcattggttgtacagggtttttatagctatacccgccttgtacgggagagagcccagtaccattattgtactggattttactgacctttccgaaatgatatattcctgcagatggtgttttgttggtcaaatcaaatggtgtagtaacaacggcatggtcacttgcccgcactacggttacacgcaccccttcgtttccggggttccaactgccatgactcgtcgcatcccccatactcccgccgccaccatcaatgttaccagacccgccagttccattcgcggcataaacttgtatgcaagtaaaggaaaatatcatcacaacggccagaaacaggttaaagagtcgtttcacttgatctcctttcccacaaaataaaaagcacagccaaagctgtgctttttgaagatgcgatattactttatcccattatgccaacctgagtattgatatctccatcactatcgatacttccaccttgatttgcgcctgcgttgggaacattatcgaaaccaggcaggccgccactggtgttggtggagggctgttcagggggaggcgtcacattgttgtgatcttgcggctcaggagtaccctcgaccggagtcccatccggcgtcttggtggggtccttcagttcatcctctgtatattccggtttgaccgggtccggctgaatggtctgctctgtgccggtaaaatcagcgccgtttccatcatcggtgttggtactggcatccggggtttccgggttaacggtcacattatctcccggcttctggtcatccccggattctgcgggaggcggggtactgctgtccgggtccaccactacatcgccctgctgggagctgctgggcgggagcaggtcatcggtgaccttgtctttgctgaagctgcttgcgatcacagcaaccaggattgcgcagaccacaagacatccggccacggtcagccacttcttggtattctccgtcatcgtttggattcctcctttttctgttgattatgcttcttgtcaaactgtctgtgtgacttcaggcggccaaggatagttcggctttaagatctgctgcctacattttcctataccgcccgtcctttgtcaacacgaaccctaccacaaacaggcagagaagtctattgggacaatagaaaactttttgaaaactgcgttaaaaccgaggggcatagcccgcgctgaccttgactgtcatccgcatgggcggcagaagctctcctccaaaagacactggaacctccaattcgatttcacagtccgccacaaaacggtcgccggcgctgtcgccggaagcgaacggtgcgttgcggatctccacatcaaggccccacacacggaactccatcccaccatcctctgtgtactgagtatggtagccgccccgataggtcagcccaaggatatcgtccaagcgtccatagatatcgccatagtccagtgattcctcaaaatctcccgccaacggctggtaggcgccggagtagccctcccggacgccatggtacacatcgtcatagttgtcgttgacggtggagatcacagcctcctgcaccgcatcccgaaccccctgggccacgatgagcagacggaaatattcgctgatgcagcacatcagcattaccagcaccagcacaatggcaataatcagggggaaggccacgccgcgccggtctttcaaaatctgcctgagtctgttcatttccagtacacctccgactttcctgtggcatctgcccgcagggtgatggggaaactgccaaagccggcaaagagaccgaggtcgatctcatgagtgagcgtgaccgtgacctcctcgttgagctggatgcggccggtatcgctccattcaatctccgggtccaggccggtctgctcccgcagggcctgttcccggcggtcagtttccggcccgatcctgccggcgatttccgcctcacgcaccagttcagtggcaaaggtatcgagctgctgtttggcaataaaggctgggaggacctgcactgccagcgcgatcaccagcatggcgcagagcaccaggacgcacacatcgatgtatccctctccgcgtcgggatctcaaaatccgtttcagcacatggttacctcctcgcctaaagtcagatccctttcctgacactgagcattatattcgctcaaaatactggagatagagctttccgatgaaagatcagttttatcacttgtcaggaattggtatagtgcttccacaggattttttggcttaaggattaaatccaagtcatcatcgtcgagttcataactgtcatggataagagcagaaagcaggctttcctttgccgcagtttcagctgaatggcgataaatttcatcggcagatagctgcttcaccctttgagcatattccttcatttcatcttccgcacgatcaatcaatcgatagatgctgcctgtatagtccattgggcacctcctctcttaaaacatcccgcccagggaatggataatctcgtagatgatgatggacagataagtcaccaggaagcacatgagcaggacaaaggagaatacacggatcttaggcgggattttcatggcctttgccttgaggcgctggagttccagctgcttcatatcgtggctgagcatctgaaagtagtggaccccgttgtcgcctcgcagcacgccgatgagtccgcggacaatgtccgaaagcagcggagagttgaaccgggcctcaaagcgggtcagcgccgcctcataggagccggaacgcatatccgcggtgaggacatccagttcagcggagaaaacaggaccggaattctgcttataatgctcaatcatgctcagcacatcccggctggcggccagttcttgggtgatggtggccacgaaccggggcagttccgcctcaatctcgtccctcttggcagagagtttttcctccgccctgcgaatctctttgaaataaaccgccaccgccagaagaacaactatcaacgccaacattgggaaaatcaacaggcacggaatcaccgtcagcagcactgcaccggtcttgatcatggcaaaggcggtgtactcctccggtgtcatgttcagcccagcagcggccagcgtatttttcagacggccccgcttatactcatccatatggatgtgtggggccagcttgatcgcccagcccatgagcagggcctccacactgcgggcctgcttcttctcctggcggcccaccgagagcatggcacgctgggtggccagacgggggagcctgagcagatcagccgtcaaaagaaacatacccagcgcaaggaatatgccaaataaaaacagaaggaaagtcatggttgttttgttcacctccacataaaaacagagccagtacacgacagatgtgtaccggccctgtttttcttcttatgctgtattacaaggcactctttctatagcattattgcatcacatctaactccgcaacaaatgacggatcaaagtcatcccgccagtttcgatagtcaggatacagtcccaaaccctttcggatgagctcccggttttccggggtgtcaatatagataccgtccgggatgccgtccatcccatagatgagccggaccccatcctgctccgctgcctttgctgcttcaaaatctccatcatagagcgccatgtcatcgatgcgttctacatggagggcctccggaatataggaaccatggttgatcgttgcggtaataaaatagcccttttcctggttactgatgaggatcacctccgatactcaatgggctgggtcagcttgatgaccgctgcggtgctgatgaacatcacagcggcaatggctgccaacagcgcctgccccagcggggtgtgcatcagaacatcgtaccagtcctgattgagccagtacaacagcgggatattgccgatgaccagcacctgcatggtgataaactccttgcggggctcaaacaccagattctccagctcaccgttgacgatccgcatatcggagagtttagccacgatgggagtcaggatggtcttgagcccccggtcgtgtcggcaggtcagcagagcggccacccactcccgaaacacggcgttgtcgatcttcgtccccatgtcctggagggcggcgtccacatcggggtccaccagcttgatccgggtgagaaactccacaaacacactccggacgggcgggttgagatagtcaatgttttcctccactgccgtctggatgtcctcattgcggagataagctgtggtgatgatagagagggcggtttccagttcagcggcaatgttctttttgtagtgatttgcggtcagacggataaaccagaacggcacgaacatcatgcccaccgccagcaccggcaccaggaagaggttgcccagcgtcagggcgaaggcggcccctaccagaaaaagaagcagggacagggcgcacaccatgggaaacttggcggcccggccagtcatccgcagaatggtctgtgtctcctcgatttcccggcgcagaaaggatttctttttgcgccgtgtactctcattaacctccgaccggatgcttttgggcttactggtgattctgcggaacaccccttcagtgaagtccataggggagatgtgtaaaaggacaaaacaacctgtgatcagccctatacaggcaatcaactggatcagattcatacagattcgcctccttccttgccggtttcaggtttggcaggcggcttggactgtgcgctcctggtcttcggagcgggcgttgcctgtcctgcctttgccggactggagcctgacttacccttagagggagcggactttttgcccacgagctgagtcagcacctcctgcggcataccattgtcgatgaaccgcttctgcaggctttccgagatggggttgaccgcctcgtggcggcccttaatacggtatttgccgtcctccaaccggttttcttcgattttgaagtgataaagggtgttgtaccggcgctccccagtgggcaggatctcacactccatgatctccatgattttacggctcttatcctccagctgcttggcgaacaccacgatggggaatgcctcggtgaccagatccatgagggtatcgtcggccatctcgtgcttacgcttgcagagggtgaccatacgccgccatgtagcctgggatgagttggaatgaatggtggtcaacacgccgtggccagtacgggcggcctcctgtgcggcatacgcctccgcagaccgcatctcgcccacacagatgatgtcggggtggtaccgcagggccatgtccagcagcatatcctgatcgatattctgcttggcgttctcgctctcacgggtgatggtgtggatgacgctgttgcacacccggccatctttctcccgcaccaggtccagctcacgggagccgttctcgatggtgaaaatacgcttgttgtccgggatggtggtcaggagccagcctgccaccgtagtcttgccggaaccggtggccccggcaacgcagacggaaacgccgtaacgcaggcaggcggccagaaagtccagcatggggcctgtggctgttccaccttttacgaagtcctctttctgcatattctgcgggttgacgatacggatggatgccgtgacgcccacatcctcgtccaccaaaggggtcttgaggaccgcgatgcggatgttcttgctgagatggcccaggacggcgggactggcattgtccagcaccataccgctgacatggagcatacggcggatcacattgacggcgtgttcagggctgtcgaaatgttcctccagcttgaccgtttcgccattggcgtacaacacctcgatatcccgccaagagttcacattaatctcctcaatgccggttccgaagatgtacttggtgagcaggccgaactcggccatctccgtgtagagggcgtccaccagctggtcgccggaatagcctttgaccgcgatgcgccggtcctgcacatatttggtgatgtaccgtttgatctgggccttggcgtcttcatcgccgccctcggtgatgagggcggaatacttgccggagatatattcctgcacatcctgcaggacggtgttgaaatcctgcccttcattctccggggtgaagaagagagaatgcgcccgatagccgcctgcagactctgtattcagggaccgcctggggagatcctccgccatgttcacgctatctgtgggatcagcttcaacccctgtcccatcatcagctggggcgtgacgcagcggctcatctgcgggctggggttctccaacgccggcttcatgctgattctgacccatattgccgcttaccgggcagtccgggccgaaatagagggggagttcttttttccgcccgtccggacctgtcgtgatatgtgttgcggcggctttctcagcggacgctttgggagcgaacagggactgacttcgcttctcgcctaacacccaaacacctccctggcaatcttctcgatctccttgcggaatacccggctgtccttcatggataggtccgccagcaggttgccggccagatactgtccctccagctccgccgaatggggcagcgtgaaggccactgtccccagcgcctgactcatgtgatccccggcctgctgggactttacattgctggcggtcttgtactgcttgtccgtatcccatttggcatcccgcaggaggggaagttggctggacaggtagctgatgctcttgaggtcggcgttggccagccgcaggacggaatccgcctccatgagcgccacagcggagaggatgtcgttggcgatgtaactgccgcagtcaatgaccacataaggagcgatctcccgcaggcagtcgatgagctcccgcgcctgcacctcgttgtaaggcgggtaggtgtactcattctctcccttgagcatccccagcatggtgaggtaacccaggcgtttgtgggtgaccaggttgttcttgaccagattctccgacacatgggcggcggccaacacgctcccgagggaacgctcgcactccagatctgccgccgggcagatacagggaagcattggggctgtcatgtcgcagagaaggaggatcacattccggcgcttgtcggccagatacttggccagccgcacggccacggtggtcttgccgctgccggggctgccccacaccgccagcaccccgccgctctgatcctcctgctcacaggcgtcctcctggccacttcctcgggaaaaaatacccgctttcttgaagttcagcatcaggccacctcctcggttttcgcgggcgcctccgtttctgcggtttcgctggagtcagcggcgggttcggactctgcgggattctcctgtggtttctcctcggggtccggctccgggggatacaattccagaatgatctcgtcttgagaggtcaggaacttgtcggcattctcccggtcgccccggtagaccagcgccagatggatggtcccctcggcctccagctcggccaacactttggcctgctcgggggacaccagcagggtgacagtatcgggcagttccttgtcatcctcctcgtccacaggctcaccggtgttggcgtcatagccggaggaggcggtaacactgataatctccacatactgcagctcagcggggacaacggtctggccctgctgcttgtagtccggggcgatcaccgacacaatgtcgccgctctgcagcttgccggagagcccctccgcaaaacttttgatggacacggagatggcctgctggctcccgtccaggctgtacaggtaggcgttttccgctgctggggcgtctgagagtttggaagggatgatatagtcgcccacagccagatccgcagtagcgtatttacccacgacgctctctttctgccgaaggacatcctctgggagattatagccgcccacctccacgatctgaaccatgctctcggtgatctcatcgccggcccggatgggctggactacccgcacgatctcagctttctggctgacgctctggttgaacagcggggtcagaccgaagcagatcagcagggagagcaggatgcagattacaccgaccacggtgcgatttttcaaaaaactcatactggcatttcctccttgatttcatgttgggtcggaaagtccgggcattacgcccggaccgatctggcccttctgctccgcttcaaccggggcagaagaatggcggccgccgtcaggggcagggtcacgccaacgatggtgagcacagtctttctcgttacatggaacttcttcatagcagtcaacctccaaaacagtatagtgcggcaaagccgatggataaaaatggtcccagcggtagcgccgcccgtgtcattgcgggtagcggatgatgaatgaatttttgaaataacatagcggtgcagaaatacagcaccgccagcagcagacccagcgccatcccccagatcccccgccaaaagcccagcacaaagccggccgcagcagtgagtttgatgtcgccgccgcccatgcactccggccggatcagggcggcaatcagcaggggcagagccgccagcactccaaaaaactgggcggggctgaaggagatcagccccgccgcggcggtcaaaagacagaggaaatccgggatagtacgcttgcggcagtccaccgcagaggcagcggccagtgccgtgagaaacaggaacgcctgcaccgggtatcagcccttgtagtcaaacatttcctctacgcgctcggtcacggtgggcaggacggtgtccccgaacagagtgtagaggccagccaggagcagggcgcccagcaccacggcaatcaggatcttgatggcggtgtcgatgtagccctcgccgcgagtgttgcagagaggggcggacaggtgggcacgggcgcaggtcatggcgcagtgggccttgcaggtcatcgtctttacggtgttggacatcttgttgaacatcttcttcatagagagttcctcctcaaaattttagattgttgattgttgtgtggtcagtgggtcacatacccatcttctgagcctgctgtgccgtggggtccggcgcggactggggagagcggttcatcccctgcgtcagtgcctgctggtaggcggtcacgacagccgattccagttcggcgcgtgcctcccgtgtgtacggaaaacagatgtccttgatttcacccttgctgttgatctggccgggcatggatacaaacagcccattgctgccctccatgagcttgacgccccggacggcaaaacagccgttgatgttcagcgatgcggtggcccggcagggaccgtcaaactggatagagtggatacggacatcatactgcatgggaaggacaggagtatcctgctgggaaacctctccctgggggttttcacttgtggtctgcgcttttgccatggtgggttcctccttttctgaatataaaaaataagtggcttttccgctcttgggtcacagggtcatggtcatgcctgattcctgctccggggctttcagttggacggggacgatagctgtgcggtccacatagtagaactcgctgccggaatcgtcgtagagttcgacaaggtctgagatggccagcggctgtccgtcgctgcccagggacctgcgacagaatgcctcccagatcccatccagactgttggtgctgacagtgccgtcaaacactgcctggtaacgggtaaggtcaggtccgccatattcaccactcatgcggtccagcccaatgaagcgcatggcggcgggagctgaggggccgagctgccagatacggcaggatttcagggctggcccgttgtctgctgccttctggtatccaccgctggagagacggtcatagatgccgtcctcccaccggacagccagccccttccttgccagccagtcctccaactcctcacggcggaacatggagtccgccaccactccttgttctgtcctgtagcccactggattcccatagtagagcagacatcgatttttcatttccacacttcgcatggcggcatatctcctttctgcggttaagtcatttccatccctcccatgcctgcgttctgcccttgaaactcctccagcttttctctggcccagccggggaggaattcctctttcagaacgccggtgaagtctgtgcggttccatctggtctgctctccatcgcccaggcaggtacagcggatagaccgaccgacagcgtgggggctgcatccaaagccgtcatgggccagccagagctggttctggggcgtccagcaggactccttgagggtgtctggactgagcaccaacacccggccctcatagtccagagattcataggagttgggttcgcagtgctccggcccaaatagttccagcttgccgtatgcctccctcacttgactgataaatgcgtccagatacgccagggcggtgtccacttcaaaataacggttatgggcatcatcgggtgggacataggctttcttttgccattcttggttttccgcgctgagctgctccttgtaaggccccagcctttctatcgtgttggccaggacgaaattggtccgcttgaagccccaccgtttcagcaccatttgggatgcttccggctttaatgcgctgcggccgtcgccatagacgcggatgacggcttcgatgtcccgcgcacaggatacattggcgtggaaacttgcatcccagagcgcagcttccccaagtctgtgggcctctgactgtgagccgggatagaggtagatatcctgttccatcttgcctcctttacggcaggcgccatttgcccgctggggggatcgtcagcgggctgatgcccagctcattgagcaggcagcaaagctccaccgaaagctcccgcagttcctccgttgaggggacgatgatgagcgctccatccgcggccagaaccgcgacttcttctcccacggggatagatgcctcggataacagtgcggcgggcagattgagttccataccgctgctggtgtatccggtacactcagcgtcgtcacaggttctggtcaccaggagtctgtttgcgtcacagtcgcagatgtactggttcgctggggtggtgatgggaacttcttcccccggctcatagcccattccgcgcatgaaaaatgcaggcagggtcagagacccgtctacaccgacccgaaccgttgtatggatcttactcatcgccgtgttcctcctgcccattgcatgcggtgcgttctccgtagatgagattccccaccatcagctgttcctccagctcgcccaggcagattccggcttcacccagcatctccagcaggtagggaggcacatcccgcaggtcatggtcatatccggcctcggcaatggtgacggtcttttcttcgtcatccacatagacacagagcttggccccggcagggatgccggcttcttcccgcaggtagtctggcagttccagcatgccgtcctccagatcatcgaatgggcagccatcctcgcagtcatcacaggtgccacagactctggccagatggacggtgagctccgtggccagccggtgcagggcatccatcgcctggatcagttccatggtggtcatttgctttttcagaacgaccaccgcgctgtccagcgtgtggatctcgaccttttctccgccctcaaagccactgatcttgaacgctccgccgggaatcaaaagagtaccattgtttatctgtttgttgaatttcatcttcttctccttattacattgaaattgtagaacgggctggattggatgctcccggccattcctgtccttgttgggcagccagcccgtcccggaaggctgtcagatcttctcctgtcggcgtatagcgtcttgcttcaagggcggccatcagcgcataggtctggccaacctcggacagcagtgcccgaagatcgtccgcaaccatatccgtccccatccggcggagctgcacggtaaaggtgattcggtaatgcggctggccggggatgctgtcgatccgcatatccattcccaagttggaatcgtgttgcgggcggatatagacctgacccactacgctggggcagacctgaaggcggccctgactcatttcctcaatcagctgagccgcctgctggagcttttccagttcagagagctgttcatccaattgcctcacccccgttccagtcaaacagcgtcatttgagagggaaccgcccggctccgctcccgcaggtcatagttggcgataagcagttccgggaactgagccccattgtcgtacctctgcttgatgttgttgatacgggtggtttccatgaggtagatgcctggcctgtcgtacagcccgcggacaaaggcgtcgtcgttgtaggagagcaggaatttgccctcgatccgcatcagggcgtcccgcaggcggatgtggtcggcttcggtgaaaccgtcttcaccaatgttctggtaatacccctcggtggcatggtagggcgggtcgagatagaaaaagctcactggccggtcatattgatggagcagtttttcaaagtccttgttctcaataaccaccttggcaagcctccggtgggcctgctcgatgagcgaaaagttgctacgcatatcgtggggctggctgccaaaactggtcagcccggaggcgtagctgtagcggatgagctgatagaaccatgccgcccgttggacatcgctggcggggctgtcccgcgccaaggcggagcggatgcggtcaaagtcctcccgtgcgttgagtacataccgcagagcctccatcagttcctccggtttgtcccgcacacagcggtacaggttgaccaacaggccgttgaagtcattgtagacctcaaagtcgttgccgggaggcttgtggaacagtacccagcccccgccgccgaacacctcaatgtaccgctcatagtagagggggaacagccggacgatcaactcccgcagggccttcttgcctccaatccaggacatgaaactgttcagggcgtatcacccccatccagcggcaggcgggtctgtgcggtatcctctcgctccagagtccgatccagtccccggatggcggccgcgattccgctgatccgcctggtcagatgggcgatggtggcccgcacctcctggtccgtggcggcatagaagtatccactcccgttgctggcgatggggacgccatcccgccgcagggcattgaccatgtgtcgaacctgaatccctttgatgccgaaggtcagttccaactcccggctggtggcggcgttgagagctcccatgtggtactgctccagatattccgccagccgttctttctccatgaatgcctcctttccgggcctgttttccgaaaaagggcataaaaagaaggggccgttttcccctttcggaaaacggcccctgtgtcatattctatatcctgtttttacttcatcgaatcacccccagctcccgcagcggacagatgcggtttttgtgacttggcaatagatcggctatattgacagagcgggactgtggtgctcaggctggctatactcataccggcgctctccaccgttccaggctacatagccgtggtcggtggtcgagaggccatattgacccatattggcctctgcgtaggcagccccgtcaaaggcgtctgttatcagtctgctgggcgggatcacgccgtttcggaccgcaagttcccgcccgtatgcggccaagtccatgccgcgggggaagaactcatagtgctggagattctgggcgagatccagagccaaatccagccggtggcagtcctccagctccagcaccgcctgccatttgtccaaccagtggggtgccccctgaccctgttccgcccaaacataaccgaagtcaatggcatggcgaaccagttcgctggctgagtcgtactggtcgagaatacccgtcagctggggcaggcagcagtccacctccagcgcgatgcactcgctgaggctctctgcctgtagcgagtccagccccagcaggagttcgtccggatggtttgagtcgatatactcgccggaatccgggaagccaacccaaatcccctccatattgctccggctggccagtttaactcgtatggcatagtcaccggcgaccggctggagggtgggatcttcctctacgaagggatctgccagtttgatgttccgcacatagtgaccgttacaaaaggctccattctgcgactggtggtaggcggcccccaaatgctccgcattcaggaatggacgggcggcatccgaggaacactctatgctctccatgacaaattttccaagcgcggcctcgtctcccgcgccatagaagaggtcgtaacagtccagttgggacgcaatccgcatcacatggccgatctcttggggcttctccaactccatcgccccttggaacaggatcttttctttctctgtcatattggaaaagcgccgctccagccagtcatgctccgattttgtaacatagaagccgtccagcttgtcaaagagggcggcgttttgatctgacatcgctcacatcatctccagtccttgtcctatttcctgttccggctgaaataccgggagaggctggccgtcctttctgcggatcagaccatactctgtgataacccccagccggtcatccagcatcttctggccgatctgggccgcctgcggggtctggaacagctcctctggtaaagcagaatacttctcacggaacatcatctccgcatagccccaggtctgcgctacctcgggacggagttcgtactggtcaatctcgcccatcaaccgtgtggcgtcctgcagactggggtggtcaaccacggataaaagcgccttatacttgaccatatccgattcgggccactcccgttctatttgagccaaccgcttggcaaattcgtcggcctgttcaatgccatcctcatcgtcgatagcgttgttgatagcatctcgcaggaaggggatcaggcaatccacacagcggaatgcacattcatccactgaggcggcatctactttttccaccgctctccatataccggcatccgctgcgggaagattcagcactgcggttttgtcgttatcatagcttgggtcattgaaaaatcccttacgcacctccagcatcaccggagcatcggagcgatggaagcaagccgtttcattggactggcacacatagatgtccttgatttctccacccagttccgcatagccgaagtcggtgaacacgccgccatgatcctcctgatgctgttctcccaacagttccagcagtctttcttgaaagccgctgccctcctctgtggtgtcaagcagagccatagcctcatttgagagcatttcatttgcgtataaaaacgcccccagttcttcatgattggaaactcggggcgcaaaacagcagatatcggtattgtaggtcaggttaatcaattggttcagcggaatgggagcgacgcggtgattctgcttgattttcaaaagagcatccatcccttttttctgctcctctgtcagtgaggccaatcgctgggcaaacaggtttaggtcgtatagattagcattccacccaatcatggcatgcgtgaggccattgtaatggatgcaggttagctcatttttgcagaagctaccgtctttgattctcgccttttggagtgcgtcgctgaactccgcaaaggatgctggcattttcattaccgtggccgtctcataagatttaggtccactgttgctgatctccacctcgaaaattgtcttatctaagagtaatccctccctgtgtagactcttgctcaggagcctcgggcggttccatgtctgagtgaacttcgtttacggtttccaatatggattccaagtctcttttccgagaaatattcgcaaaatccacggagcggcagtatacttcgccatcctttcccacagagcactgtgtctgctctttgcctcgcatctttttcgatttcactgccaggcatccgtcatcggcaattcgtgaggagaagcccttttcctttaaccgctccgacaataccgaaaaaaactgccgcgttctcccatcaagatccattttatacgcctctttctataaactcattccctgcatctcaatatcttctgcaggagcggaaggggcctcatagagtgtgcttcggccataagcgatgcggatgatatcctctgcggagtagtcggagccagcgccaaaaagatgcctgaactgcaggcggtctgacggagcaatgtaccatgtggaatactgagacttcagccctttcagggattcagccgatgttttgaaggtcagttccactccgtccttctgtaccgtgacattgaccgtctttgcgccacttttttggagggcatctgtaatcgcccgcatccgatagaccggtgcatcgctgtcctggctgagcatctgatactctgccagcaacgcatccttctttagaaactgcgccagaaattcctcctggttgtcccgcatgtactgttccgcagttgtttttatataatcctccggggatttgaggtaggagagcagggtgtcttctgtcaaggatgtataatactcactgtgaaactgtacatcgggtttctccccagaaaaaacgagggaagctgcctcccgccctgcctcggttcccttgtaataccggtatgaattgatgttcctctcactggtgagttccctgacagagaggcgacttcgctcattggaaatggccgcctcaacatagcggtcgacctcctgagcgatgcgcttcccaaacgccgtagaatcctggcattcttcttccgtcagtccggagacaaagttgggaagggggtcatccagaagatggagcgcctggtgttgccggtcgtacaggccgcagaactccaaacggtcgctccagctgatcctctctccataaaatgtttcgcatccaaagaggtaatcaatctctggcgttgcgggaactttcactactgagcccaaatgcttgcccttttgcagaactaaaactggcacagcggcattttccagccactcttgaaactcctgccggggaagtggggcctgcttttgctgcgacattacaaaatcctcccattttactgtttctgctcaaagtttgcacaacttgtctgtcccgagtatgactcttcatagtgtttggggtcagcaccaggcacatcccacccagccatgcttcctatctccatagcttgccgctggatgggggtgacgcccaggtcttcgttcaactcatccgccagttccacattcccttccttgtcgccggtatcccagtcggaggggtagtagccagtttcaccccgtttgatgcagataagctgtccggtggtccgcagggtggagaagcacagttccggcaacccctcggccaccttgggggcaaaccgttcctgttcggtttggatgctccaatcatcaggctgccacagatggacatacagctcgccgccgtccacctcgatggggcgctgctcgaagccttcgccccatccgtcagaggcttgtccacccaggtactcttttaagatggtaagctcttccggagtcagctctccggccacccggcactccgctacgccccagagctggcgattcctgacctcaacagtaaacaccgccgagcggaccttgtgatctacactgtcgtcctcaccgtaccagcgcatgaggccgctctcgttttcctctggtacccggttttttaccagagcggacagaatttgtccctcataatccatgagggtgtggccatcccactcctcaccgtcctctgacatatcccccactcgtcccgtccatagaagtccgctgtgagcggcatatacaatttgaatgtctgaggctctggcagatagaccgagaatcggtcttctcccagcaccagagccaaggtacatccattgtcccactttacatggaattgcccggcatcgtcgatataatccagtttcccggtactgccgggggaaatgggccggggattaccgcctatctctgtgagttggatgcgggaatccttggggaactgctgccgcaagaagtccagccactctctcggtacgctttgcatttacatctctcccattctaatcccaatatccggctgatttaattgttgatagagccgttccatcgcctccgccaccacgaggtccgaccggaagctttccagtttttcgtgatccgtaaagaattgctgttcaccgctctggaaatgaacaaagtccactgtggcgataccgtccttaataacgcccagccgtttctcactggtattgctgtcctggtagatttggattgcttcctccagagtcagatcttgcctgattatctcctgcggggtattggtgtccgccatgacaaaccaggcataggtgtggggaatgctgggatctgcggctttcctaagagcctgcttcccagtttcagtcagtccatagttgcaggtacggcgtgaattgtcctcaccggcaaaatccaacaggatatcgtctaccgcttttttgacctccggatcgtctgtcagcgtttcaaagcggaagccggttgtgctgcggaagggcagttcctcccggatggcctggagcaacgccttggaatccgtgaactcctgctgttcgccgctggcgaaggttacccgacctaccacagggtgttcctgtcggtacatctcctgctggcaaagatcatagcaatagaggtacccctgatactcgccgggaaagggagtacagcgtagacagaaacggtaattttctgtttccgcaatatagccataactcctgcggtcctctgtgatggagccgccatgctgccagcagtaggcgtccatggcccccagattcttcaggagtccagtctgacgcaggtcgtccacaaatcgctacagcacctctttgaactccggggtgttgaacctatcctcgttatgggccaccaggtgtgccagaactccttctcaccatggccgaaatccatgcggaggtggcctacagtacccagtgcctcgtccagcttttcttcggaatagaacagccccacctcatccagggaggcggggcgcagtacaaactcacgattatcctgggggtaggccagatcatgctcctcgcaaaactgctccagcgtcatttcttctcccagcagataaaatgtgccgttgacccggcgcgaagcagtaccttcatgctttaaagggattggagaaagtacggttcctgcatgatagtcagcggcatgatccaccagagtggttcgggtgctgggagatttatgtgtcccccgcaggtcatagcagtaccacccatcaggaatgatatcccgctgaatcagccagttggtgaacagcacaggttttccaagcaacgctgcgtgttgcatggagtctgtccagatgttaatgctcatttaatccctcccatattcacagtgttttcccactcgtgctggttccacagcgtatcttgtatctgcgtacagggattaatgcatctgcaacccatcttgtacttcagggaacggatcactgagctttcggagcaggccaaattcggtccttctcacaccatcctcccgcatataaaagttgcccattgcttcgaaatccgtaaagccatcgagggtagagatcagctcctcgtccgccccgatccgctccaacacctgcttgccatattcctccggatcgtccggtacacgctcgtagtcatccagttcgatggaaaacctcaaagcctcctggagcgttgccggctgttccacctcaaggacagagaggtatttcagcaatgcgccatcctcctgatccattatccggatattttccgccaactcgtccaattgctccagtctcagatccatcccctggagaggaagatattcccccagataaggccgcagggcctccacccgagtgagtttcgccatattgaggctgtccactcccagaagttgtctggcgctctccaattgctcaaaggtcgcaggcagagtgatctgcgctgtttcgctctgtacacgaacagggcaggggttttccatccatatccggaaaacgccgtccaatctctcgttctccaaaagttcaggtgtctttttctgcacataattgccgctggaatattctcctccatgcttttcccgatattcagcccccacacgggcataattgatatagggcttgaagcgatccggaaatggtgtgatccctttgttcacaaggtagatgcccaattctgaatcagacgacacattgttgacgagcatatactcatccagcctgtccgccacagtaagggccccctccaagttccagacacactccgcatccaatgccccggaaaagatggcggctttcgccggagaaagtgcctctgtgcgttccgccagtttttgtagtttttgaaactgctccgaatcttctacatccacatcgtacaggcatcggtaaaggaccggtacattgctgctcacatccaggatggcggtggctgtggtatcgaggctgattctgtccaggaaggcaaatgtctccccaatctcagcgggactggcgggcagttgcagacggacagtttcttctccttttccccggctcagagtcaacagaatcatcgttacattcctcccatctgaaattcctgttcccgctggtgctgctctgccggaccgccggccatcagctcccccaatgtcaatgtgccacagtaggccacatatcctttctccgtgaaggctcctgtttccttctccatacggagtttgccgtaacgctcataatcatagaactcctccagattggggtcatattcataatggccggagtcctggatcatgtatctgccatattcggcgggagtgcggactttgggtgcaaactcaaacagctccagatttttggccagttcgcgtatctcgccggcacactccggcttggccatctccatgaccgccgtcaactttttctgttccaaatcagacagtgcagcgatggccgtcgccatatcattcagcgcgaatagatcctcccgttgtccctccaggacctcctccacctcggatggaagcagactgtcctcataccagatgcgggcatcgtggatgttaacgcctgagcgtgcaattccacgctggagctgttgctcggagcagggcaggagcagccaagtgatttgatctgtattttccggctcctgccgggaggaaagccctaccgccagcagattcggctggtagtggtaacaggggaagtggcggccgtcatagagctgctccagtttcatcccgttatcatagaccacgccataaggggtaatccttccctcaagatgattgaggatcaggtccagagcgaacttgcggccatccagccgctcgagctcctcgattctgcagcccccaccctgcatcgtcatgtagtgctgccgcccaatggcgtccaggtcggagaagtctgtgatgaccgtggcctgctggcagcaaaaggtcagattgatgaaatcctttatatttgagacgcccaatttgcaggccattccctggaactgggcagcctcaccgtcatcaaaactgtccagccgtttggccagatagtccagctcatcaaaattgaccaatgagccaaccagcctgttcagtacggtatagaagctgtccagttcatccacccggcaatcctgccggagcgcgtcaccgatttccaatggctccagcagttcgatcatgcggtcatatttctcatcggggatagggaatggaaccgtaatctgcccatattccgggtgctgagcgctgctcagtaccgctttcagcacatagcccattctggtgcctccttactcgcatccatgaccgcctttccatatctggcaatcatggttgcgtaaataatattgtggaagtccagatcactcaccagttttgggtgtgccaaatcttctgcctccatgggtgacttcaggtcatacagccgtctggcggaataaaagatggggtaatcctgtatcgcaaatccatggggtttggatacgatgcggctgaaatcaatggaatcgtgtgaaagagcggggagcgccggttgccagagtcgctcctttgaggcgagaagatagagcgccgccagatagccaggaggcgcatcatcccataccctgtccgcaaagcggcttctgaggtggacggacactgtgtgcaggactgcctgatccggcccgctccagtgttccacagcctgaatcctcttgtgcaggccggcatgagggatgtgtccgaaatattccagaatcaaatccaggtactcaatcgcgccggacttcaaccgctccgcgatatacggacaggtgcggacttgacaggatcggcggcggtaatgcaggcagtaccggcaatccacatcctccggcttgtagcagaagcggctgaggatcatcatcccgccgccgcgcttctggaagccagggacgctcatcatcatatgctccagaccagctcgaggggtattctgagcgaaatatcttgtcatggcacactccttctttcaaaacaaaaaagcgggagctgcttatgctgcacagtgtgtgcagatgcggctcccgctttttctgatgtcacatatcaatttgtggctcctgtgcttgtccctgctccagtctgtccgccagatctgggacagtgtattcgatctttgtccttgcggtctgcatggctttgaggtgtccatcttccagctctgggccttcatccagcaggtagtctgtggcccggtagagttcagttagctcctccggtgagaaaagctgggtcttggagatcagcccggagcggacggcaaaatcctgcttggccccgcaaaaatcttcatcataataatgtccgtagctcacgccggttctgttatagtcccagatccaagtgacaaactgatagcccctgccattttccaactcccggccagccagcactgcgccgccaaaatccgccagcagatggaatttttcgctcagaccgctgatatgaagggtgggcgcagtttgaacctcctcaacataagtgtacacttcatctgcggtctgtgcgactctgtggtacaattcactggcctccggattattgcttccggcaggaaaaaggaacacatcgtttcctggagaaacaaagaggacaggctgaccatggaggaaaatctccagccgcctatcctctacattggatgattcaactccgccttctctcaggcgccgggaaagttcttcaaaaaattttttcaatggttaaacctcatttcttttttatctgttgggacgacaacaaaaaagcggagattctatcatcgaatctccgcttcaataactatattggtttttctccggggaagggaatcaggtgtccgtcctctttgtgttttcgtatggatagaacaatgactcacacatttggtctgtgtgagtcattgtttttggtggagataagcgggatcgaaccgctgacctcttgaatgccattcaagcgctctcccagctgagctatacccccatgttgccagaaacccttgattttgctggatttctgagctattcaattttttgactttactctccgttgcgggggagcacacccggttgcttgcgctcccagctgagctatacccccgaaccgcttgtcctatgcggctttcgcgctcggaacattgataagtataacaagatcatcgccaaatgtcaacacttatttttcgatttttcaaattttttcaatagggggttttcactcctcttcaggccgcaggacaccgtggaggacgaagcgtgcattctcaaattcatagctgcaggtggagagcgtcaccacccggtcctctgccctgggtgacaccttgctggaaaaggcggacttctcccccacctcctccagccaggccaggtacgcctgctcatcggagaaatccagcatccaggcactctccgccgtgtccgccacgtagccggaaaacagctccaccacataccgcccctccggtgtcaccagcagaaaaaccgggtgggcgtcatagtagacctgctcctgataattccccagggcggcaaacatagtgccgtttttcatccgatggccgtagatcaccgtgttgcggccagaaaaatccggccggcatgatgtgtccacaaaaaggcacccggcgctgttggccgtgccgtccaagagatggtccaggtaatagtcattgtccgtcccctggaccaccgggtaggagatgccggtgtccgggccgtagagccaggcagtcacatccggattcaccgccgccagggccgtgaagtccacctccggccaggccagctctgccggcgtctcctccgtctcctccgacgcagggggcagggacgcaaactgctccagtttgaaataggcgtctgctcccacccggtactcgtgcaggatccgcaggacctgatatccgctgaagcaggcaatgcccagaaacaggcagagaaagagcccgcagctccggcccttcataccccctcctcctttgcgcagtccttccagcgcaggctgcgaagctcgtccttctgctccggcgtgatccgatagctctccacagccttctgaatggtcttgttgtgggtccagcggtccaggcgacgctgccgcagatagggcagcgccgcgtcgtactgcttggccagggcggtggcaaaataccaagccgccatcatcttcacgtaatactcctcccgccggacaccggcagccagatccaagtcctccatctgaaacccctcatccagataaaagctcatcagcatccccaggccgaagcggacagtataggtgtgcgcatcctccacccagcggcggatctgtttccgcagctccggcggatgcttccggaatgccttcgggctcaacaggtcgcaggtggcccagttgtccacatagggcaggaatgtctccagcgccgccacggcaccgtcatagtccgggatcgccgagatcagcaagccgtggaggttattctcctcataatagcggtggggcagctcctggaggaagccccctgccaccggcgttccggcgatttcccgggccagcttccgcaaagccggcatccggacgccgatcaccgtctgcgggtctatggtgggtatcagcttgctctgaaaagcctgataggccgggtcccgcagggcaaagagcgcagtttggatgtccgtcatatccccgcctcccatcagcgcagctcgtccttcaaattgccgtccagatccagccactggacggcgtcctccgtcatccgcatacagccgtgccagctgttctccttggggatagaaacagagccggggttccaataccacaccccgtcctccagacgcctcatgggcacgtggaagtggccgtagaccacataccccgccccgtccagcagggtctgggagggccgctgatccacattgaaatggtggccgtgggtcaggaacagccgcctgccgcacagctcctccacctggaagtccgcctcgatgggaaagtgcagcaccatctggtccacctccgcatcacagttgccgtggacacagaggatccggtccttcacgctgttcagcatggcaaagaccgccttgggatcgtatccctccggcaggtcgttccgggggccatggtacagcaggtcccccagcagcaccaggcggtccgcccccgcttctccatcaggtccagcagcttccggcagtacagggcactgccgtgaatgtccgacgcgatccatacgttcatcgttcttctctcctgtcgtttcgtgtctcttccgggtatgcgggcccaatctccaactcctcataaccggtctcgctgtccggccggcgggtgaacacgcagctccggatttctgccagtacgatctcggccgtggtgttcaccgtgcaccccggcagcaggtggccgccgaaggcggagaggtcctcccggctgaagctggcgtgaaggtggcagccgtactccgatacggtgcccatcagggagacgatctccacatcctcctctccgctgcgcacccggacaccggtcgcgtcccgcagccgccagcgggagacgcagcccacaccggaaaccactgccccggcggcgatatgatgcgccttcacataggcctcgatctcctcgtacaaatcctgcccccggcggaggcggaaacaatgatacatgatgttccctccctgattgcccccgtctccggcggctttgcggctattgtaccacggaacggcgccgcgtacaacggatttccggcgacaatgtgcaggggcgcggcttccgccgcgcccctgcgcctcatttggaccgcttcagcacttccagcacgaaccgccacacccgctggacggaggcgatctccatccgctcccgcggggtgtggatgtccagcagattcgggccaatggacacacagtccagccccggcagcttgccgctcagaataccgcactccacgcccgcgtggatggcctcgatctttggcttccggccgtactgctcctgaaagacctccgtcatcaggtcccgcagggaggagtcctgccggtactcccaagcgggataatccccggagatggagacagtgcccccagctgcgccatcagggtccggaggcgacggtggagcatctccttctggctgcccagggagctgcggacgcagaaggtggccgtcagggccgtctgctccgcagccaggatgcccaggttcagcgaggtctgcaccagaccgtggatctccatgctcatggcctggacgccgttgggcaggcaggtgagcatgcagactgcccgctctgtggacgcccagtccataggcgtctcccgcacggtgcagggcgccgcctccacgcggaggcccgggtccgctgcggcatattcccgggagagatccgcggccaatgcctccgccgcctgccgggcgacggcatcgtcagataccaccacctgggcggacgcctccacggcgatggcgttgtcctttccgccgcccgccgccgtcaccaggcgcagctccgtccgttccgccatggcctggagcaatcggcccagcagcacacaggcattggcccggcccttgtggatctctgtgccggagtgccccccggcaagcccccggaccgtcacctccagcgccgcgccgccatagggcgcccgggtcacgggcagagtgcactgggccatgcttccgcctgcgcagctgacggtgaagatcccctcctcttcggagtccacgttgatgagcttccgcccccggagaggcgcggcgtccagggcctccgctcccagcattccgatctcctcgtccgtggtgaggaccacctccagccgggggtgggggatcgcctgatcgtccaggatcgccagggccatggccaccgcaatgccgtcatcgccgcccagggtggtgcccttcgcccggacgcagccgtcctccaccagcaggtccaggccctctccggccatgtccttggtgcagccgggctctttttcacacaccatatccaggtggccttgaagaatgacgggtgccgccgcctcatacccgggcgtggcctcctggatgataatgacgttccccgcctggtcctgatggcactccagcccccgctccctggcaaaggctgcgcaccagtcgctgaccgcctggcagttccgggagccgtgggggatggcacacagctcctcaaagaagcggaacaccccctggggctccaactgttccaacacgcgcataaacactcctttcccggcgggccattctcccggcgccgccgtctgtttccgccttgtagtatatcccattcccaggggcggcgcaagccgattgggaaaaacagaagaggcgccggccattttgccggtgcctcttccccgtgcgctgtctctcacgaaagctcagagaaccgcaggaccaccttgaacaagtctccgtccacagtcagctccagggtgcccttctggagctctgtcaggctccgggcgatggaaaggcccaggccgtttccctcgccgcctcgggcggcgtctccccggacgaaccgttccagcagttcctccgccgggatatctaacggcgcccgggaggtgtttttgaaggagatcaccgcctggccgtctcgctcctccagcgtcaggtacacccgggtgccccgctgggcgtacttacagatgttgttcatcaggttgtcgaacacccgccacagccgtcggccgtccgccaggatggtcaccgctgtctccggttgccgggttaccaggtccaggcccgcgtccttcagcttctgttcgtactcccctgccgcctgggtcagcagcacgccaggctggcagggggccagattcacctccagattccctgtggaggccttggacgcctccaccagatcctcgatcagccgcttcagccgctcggactggcgggtgaggacagccgcgtactccgggatcttctcactgttcgggggctcctttccgatgaggtccgcgtaattgatgatggaggtcaggggcgtcttgatgtcgtgggacacgttggtgatgagctccgttttcatccgctcgctgcgcatccgctggtccaccgccgccgccatgccctgggcgatgtggttcaggtcctcgccgtgggatttgaagtccagcaccatccggctggtgtccacctgatagctcaggtccccggcggccagagcccggccgcccagcagcagcttccggcacatgagggccaaagccagcaccgccaggagcagcaggagcttctcaaagatccacaggagcgccagcaggccccagctccaggcgaacatgctgaacaggatcccaaggccctccaggacacagaggcccaggaacaccagcacggtcttgcccaccagggggacgttgtgaagcagtcccgccagcccatgcgctgcgccccggaggccgctgcccagggcccgaaggaccgccccgccgccacggcggagcaagcggagggccacatagaccactgtattcctccaccagccacccagtttgagccgcagggccagggacatgcaccagccggtaaagacgcccgccagggcggcaggacccagtaccacagccagcaccacgccaatgcctccaaagttggcctccaccaccagttggatgcccaagaacagccccagtgccaccgccgccgtcagaaggtccagtgggatccgtgtcccccagccgggacggacgccgtccacgtaaggatggtgcccggcggcacacagcaggaagatgaagcagactgtcaccagcagcgccgcagcagcgatgatggcgtagatccagtagcggagggcgtaggccagttccgccagccggttggccagggcgtagtcgtcgtcataaacaaacacagaggacagcggcactgtaatccgcacggtataagcgttctcaacaacgccggcgctgggccgttccggatttgcccagtcataggaaaatctgaactgccacggactatcatattctgcaagccccgtgtaccagagctccctgccggtcttatcctgtaccatgacgtaagagatgttccgctccgcacagtagctgtctgctgcttccgtattcatctggtatacctgctcttcactgttccagatcaggaaattgagaagcgtctgcccgtctccccaggcgatattggaaaacagctcctgcttgaaagccgtctcgctggtgacatagacgtcggtgctgtacaaaaacaccgcgcccagcacaccgccggcggtaacggcggtcatcaccagcatcagcagaaaggctatgaccttggccgccgtactctccgtgagcctctttttccgtttcggtgccggaggctgcatgggctgctcctccatcaccgcctgggcgatctccttttcgatgttctgttcgatggccttcatgcccgcatccccttttccagtttgtacccctggccccagaccacctttaagtatctgggctccgccgggtcgatctcgatcttctcccgcaggtggcggatgtgaaccgccactgtgttctcactgccgaagggagcgtccttccataccttccggtagatctccctgggggagaacacctgccccgggtgctccagcagcagcttcagaatatcgtactccgtgggcgtcagagctaccggatccccatccacggcgacggtcttctcccggtcgtccatctggatagtgcccagggtcagcacctccggccggagtgcaccgctccccagctggaagtaccgccgcagctggctgcggacccgggcagccacctccaccgggttgaagggcttggtgatgtagtcgtctgcccccacgttgaggcccaggatcttatccgtgtcctcgctcttggcagtcagcaggatcaccggcacgttactcacctgccggagctttgccaaagcggtaatcccgtccatctccggcatcataatgtccagcagcaccagatggatgtccttccgctccagggcatccagagcctcctgacccgtgtgggcctccagcaaatggtagtccggattggccaggtagattttcagcgcgttgacgatgtcctgttcatcgtcgcagatcaggatgttatacatggggctccctccttggcttccatgataccggatggcggtttaataaaaaaccgggaaacttcttaagattttatgaagaccgctttcggtgccgccttccgccgggcggcacagccggacaaacgggaatctctgaacgcacggagcggcccccgcccatacgggcgggggccgcctgccccggatccgccccagcacgctgccgcagcggtctgtctggacctcgtcgaagccggattcctccatcttcccactgtaccagttctgccaccccctgctcccggccggaggggccggggatgcggacggtctcctggcagaagggatcagcagttcctcccggctgtcctgttcactccattttccgcagcgcaccgcgctgcttaagatactcctatggtaggggatttcgccggaaaaatcaaccccggaaaaaagccgcccggcgggagtttcccgccgggcggctttgaaggacgcaggcgcatacatttaggcgtccttcttcatcatgatgtccaggatggtcttgtcggtctccaccatgccgggggtgctgaccaggcccatgttgcggatggcctgctccggcgtcttgccgcagatgccgtccgtggactggagcaccacatcgctcatggccagttgggcacacatgatggcggcgttggtggcagtagccagcttcagggcgcagccgatcttgccgccgtcgcagatcataccggtgaggttgccgctcatgttgatgatggccttgccgatctgctcatcgctgccgcccatcagccacaccatggacgcggcggaggcggtggcggcagagacgccgcagccgcaggtggcagacagcttgccggtgaagatcttgatatacacgttcagggtgtgggaaaaggccagcgccttttccagctgctccttggaggagcccaggtgcttggccagctccaccacagggatgatggcagtgatgccgtggttgccgctgccggcgctgctcataacggcgtaggggcagccgctcatgcggccctcggcgctgctggccacccgcagcatggtgttggccgcgaagctgtcgcccagcaggtctgccttcttcagggccgtggcgatgccaacgcccagggtgtgctccaggccgaagtcggccagcttctcattcatatccatgccatccagcatgaaggccagctcctcctcgctgcactggtccaccagggcgcggatctccgccacagtcatgggagccagccgctcatggagctcatcctgtccaccggccgcatactccttcttcaccagcacgtcgttgttccgcacggtgaggacgatgttggagtgggtaccccggatctcgctgatgccgatgccggcggtggtgattacctctgcccgggcatacaactgtgtctcctcctgcttgatcatcaccaccacatggcgaccctccaccagccggatggcctcgtcgctgacggcgggggtgatgtcctccagcagctggaggctcttctccgggttgtgcaagcaggcgcccagagcggcggcgtacttcagccccacccgggagaagccggggatgcccacgctcatgccgttcttatagatgccggggttgacttccaccttgatggagacgatgtctccgccgatggcatggctggcgtcagcggtggccagggccacgcacaccggctccgtgcatcccagagcggggacgacctcctgccgcagcagggtcagcagttcttctttcgtaatcatgagggaagctcctttctgtatccaggcgaatctccaatggcccgcaacatattcaacctgataagataagcaaatctcgtgccaactgcttcccccgtgaatttcctgaaaaaacagcctctccccccttgtaaaggagagcgaattatgggaaaatggtcaaagtaaatggttaattgggaggtgagctgcgtggaaaaaaaggcaatctccatcattgcgctggaccccagagctgcccgctcctatggacgggatgtggagggcctgttcggagaggtggcggatgtctcggtgttttccgtcatggacgggagcgccatgggcatgctgccccatgcggatctgtttgccgcctccacggacgcctttgggtcgccggaagagctggcccgccacgtgcctatcgacagtcagaccatggcggtgcaggcctccttccgctggcaggagctgcggcggctgaaggaactgcccgccggcagccgggtgctgtttgtcaacatgacggagaccatggcccgggaggccatcgcccagctggagcagttcggcatcacccacgtccattggattcccttctatcccggggcagagctgccgggggatgtgcacatcgcagtgacaccggacgagatgcgctatgtgccggaggagatcgagaccaaaatcgacgtgggacagcgggcctgcacctccggcatgatgatcgagatcgccctgcggctggggctggagcatctgctggagacggagaagttccagacctatttccaatcgattgcaaccagcaattacagctttgaccagatgttcgcccgctccatccggctcgagagccaattccatattttaatggagacgctggaggacggcgtggtgggcgtcaacgaacggggcgaggtcttcgcctgcaaccgccatgcggaggaaatcacccgtaccagcgccgacttggtgatgggcaagccggcctctcaggtcttcccctatctccccttctcgaaatgtttacaggaacgggagcggctgcctgccaaaatcatccgcctcaacggcatcaacgtcagcgcggaggtggtgccggtgatgcggcagcgggcctgcatcggcgcgtttgccatcctgcagcggttcaacgacgtggaggcccggcagagccagctgcgcaaccagctgcttcacaagggctaccgcgccaagtacggctttgaggatgtgatcggggagtcggatgccatccagaaggccaaggaggtgctgcggcggatggctgtcagcgagagccccatcctgctgatcggcgagaccggcaccggcaaggagctgttcgcccacgcggtccaccgggcctcccggcggcggaacgggcccttcgtggccatcaacgtggcggccttcccggaaaacctgctggagagcgagctcttcggctatgaggagggggccttcaccggcgccaaaaagggcggccgcctgggcctgcttgagatctcccaccagggcacgctgtttctggacgaggtggagggcatgagtccggctcttcaggtcaagctgctccgggtcctgcaggaacgggagatcatgcgggtgggcggcacctccatcattcccatcgacgtgcggatcgtggccgccaccaacgagtctctggagcggaaggtggcggagggcaccttccgccgggatctgtattaccgtctcagcaccctgcccatcgtcatcccgcccctgtcggagcggggggacgatctgttcctgatcctggagcagttccaaaaggagctgggcggcagcttccgcctgacgcctcaggtgcggggctttctgaaatcctactcctggccgggcaacatccgggagctgcggaacgtagtggagtactttctctacaccggccacgatcccatcaccatggaggacctgccccccaccgtgttccacagagccccgcaggcgccgatccggcagttgccggagacgccgcagcagccttcttctgatgtgttccgctttgtgctggaacagctgtatcaggcctcagaggcccggcagcccatcggccgggagcggctgctgcagctggcgcgggatgcttttgtccccacttcccaacaggaaatccgaagcattctggcccagatggcagaccagggactggtccgggtcagccgggggaggggcggcagccagctgacgccggagggccggcagctatacgaaactggtcgaatttgatatttagatcaaccaataaaaccatttgaaagcaaatttgagaaaaccggtaccaaaatacggctccgggcgggtttggcttatctgccaaacccgcccggagatttttggttagaatttccgattgtctcctctgttttaaattctttttccgtttcctcggtaattcccgcttttttggcatatattttgctatataacaaagcatcagcgcacaagaacgccgcagaaaggatggatactaatgacctaccagtttgacgcggtggtggaccgctccgggaaccactccgccaagtatgacgagcggaagaagaaattcggcacagaggacgtgatccccctgtggatcgcggacatggacttcaagaccgcccagcccatcatcgacgccctgaaggcccgggccgaggagggcatctggggctataccgcccggccggacagctattttgaggccattcggggctggcagaagcgccgcaacggctgggatatcgaccagtccctcatgagcttcagcctgggcgtggtgcagaccctgtccgcctgcgtgaagctgttcaccccggagggtggcagcgtcctgattcagacgccggtgtactccgagttctatgatatgaccgaggcatggaaccgcaaggttctggagaatcagttcgtggagaaggacggcaagtggaccgttgactgggcagactttgaggagaaactgaagcaggcggacctgttcctgctgtgctccccccacaaccccctgggccatgtctggacggaagaggagctgcgccggatgatggaactgtgcctgaagcatcacgtgctggtggtctccgacgagatccactccgacctgatcttccacggcaaaaagcacatccccactgccaccctgtcccccgagatcgccgccaacgtcatcaccggcatctctggcaccaagaccttcaacctggccggcctgcaggccagcacagtggtgttccccaacgcgcacaaaaaggaggtctttgacaagttctggatgaacatggatatccaccggaacaacgccttctccctcaccgccatggaggcggccttcaaccagggcgatgagtggctggaccagctgcttccctatctctccgccaactttgactatgtggtggactactgtgaaaagcgcatccctaagatcaagacctatgcccccgacgccacctatctgatgtggctggactgccgggagctgggcatgggcaatgaggcgctccacgacttcatgatccggaaggccaagctgggcctcaacgacggctgctccttcggccggagcctcaatggcttcatgcgcctgaacgccgcctgcccccgcgccactttggaacaggccatgcgccagctggaggccgctgtcaacagcctgtaatccccagcaagagcgcgcagagaaataagggaaaaggagaaagaacatggcaaccattcaaaagaagagcttctggcagcagtacggaggcctgattctgattctgggcggcatcgccatcggcgccctgatcggcgctttcgcgccctctgtgggtaccaccatcaagcccatcggcgatatcttcctgaatctgctgttcaccattgtggttcctctggtgtttgtgtccatcgcctccgcagtgggcagcatggccaacatgaagcgcctgggccggatcctgggttccaccgtcggcaccttcatcttcaccggcctgatcgcagcggcctgcgtgctgacctgggtcaacctgttcagcccctccgcaggcgcctccatccagctgaccaccggcgaggtaggcgaggcccagagcgcaggcgagctgctggtcagttccctgactgtgtccgatttctccgacctgtgggataagtccaacatgctgcccctaatcattttcgccatcatcttcggcttctgcgtgtccgcctgcggcggcgacgagagccctatgggcaagctgctgaacaacctgaatgacatcatcatgaagttcgtgggcgtcatcatgttcatcgctcccatcggcttgggcgcctacttcgccaacctggttgccacctatggtccagagatcgtgggtgactacggccggtccatgctggtctactatcccctgtgcctgctctatgcggtgatcttcttcccgctatatgccttcctggccggcggcaagctgggcgtccggatgatgatccagaacatcttcccgcctgccatcacagcctttgccacccagtcctccgccgccaccattccggtcaacaaggaggcctgtgacaacatcggcgtgcccaaggacgtcagcgacctggtgctgcccatgggctgcaccatgcacatggacggctccgtcctcagttccatcgtgaagatcgccttcctgtacggcgtcttcggcaaggacttcgtcggcgcggagacctatgccatggccatcgttgtggccattctctccgcctttgtgctctccggcgctcccggcggcggcctggtgggcgagatgctgattgtcagcatgttcaacttccccgccgaggcattccccatcatcgccaccctgggcttcatcttcgaccctgccgccacctgcctgaactcctccggcgacaccatcgcctccatgatcgtcacccgtctggtggagggcaaggactggctcgtgaaggctgtggccgccaagaaggagaccgcctgattccatcgctttccagattgattttatcagctatccaattttagaaaaggagtttttcacatgaacgtcattgaaaccaagaatgcccccggcgccatcggcccctattcccagggctacgcctttggagatctggtcatcacctccggtcagatcccggtggaccccgccacgggcactaccccgaaggtatctccgcccaggcggagcagagctgcaaaaacgtgggcgccatcttggaggctgccggttccggctttgacaaagttgtcaagaccacctgcttcctggcggatatgggcgacttcgccgccttcaacgaggtgtacgccaggtatttcacctccaagcccgcccgcagctgcgtggccgtgcgggagctgcccaagggcgtgctctgcgagatcgaagccatcgcgctgaagtaacggaggtatcagatgaaagtcactgtcattggaagccacctgtgccccgacaccctgtacgccctgaaccgcctgtccgaggtcaaggcggagatcgagttcaagaatctctccgccagcctgccggacctgaaggcctatctggccctgcgggacagcgatccccactatgaggccgtcaagaaaaacggcggcatcggcatccccgcctttgtcctggaggacggcaccgtcacgctggatctcggggacgtgctgaaataaagcgatcacaaagcccggcgggggacctgaaaggtcccccgccgggtttctgctgttcttcaaacctccgtgacggctcctgtaccgccctcctccatctgccgcagggccgccagggtgcccagagtggtgcccagctgggtcagcaggatcgccgtgcgggacagctcctccgtggtcatgcattttgccatggccaccgctgtggcgtagactcctgtgctccaatcataggcatccatccctcggccccctccctggtgaacagtgtatgaggcggcgagggatttcttgacgggggcggcgtgtcatttctccagcaaagaggtcagatacgccgtctctgtccgcaggtccgcagagccggtgtaccaaagggtaagaacctgttttccctgccggagcacggcgaattgttcaggacttccgattccgtccgcctcctctgcccaccagaagccgtccagagccggggcctctattgggtccagcggcagttccggccggctgtccagaaagccggcccggttctccgtcagctctgccgtcaaggtctgggccaatccggctgtcagcatacggtaatacgcggtctggagaaaagcctgctccccgtcgggcagcaccgcagactggcgggcagcgtacatctccggcgcgatgggaagggatttttcctgcacctctgtccgcaaaggctccaggccgtccagggctgtcaggtccgccagaaccatctgcaccggcggacgttcccccgcttcataaaccgtccgcgccgcatggtcccaaccagagggattgccgtccagattctgaatgctgaccaccagattcagcacagatatgaccagtgcagcgccccacgccagctgtcccagccgcagctgacggcggtatagcttgggcctctccagcgggacgcccgccgtcagagtcttccacagccgccaggtgttccgggcatccagccagagctgcatccccaagatggtcagcagcgccgcagccaccagcggcgcggctacaaagcccagccagctggcgtttctcaggatgttctccagagaagcagccgaaagcgccaccgccaggatgaaatacgccgtcattaccagccagatcagcccgccccccactgtgcggaagatcatccgccgctttaagtatcggtatccctctccctggaccaccgggtccgtgtccagctccggggcattcgggtcatcgcaccgccagacccagaagggccccagctgccccaccagccgccagcccatgctccggtatgcctccacccgctccgggtccaaagcctctttccacctttggaggggctggagccggaagcggcactcccacggttcgtccagcaacaggtccacccggctgcccgtgaagcagacggggttctcccccttgcgggccaggtcctccagccaggtctccaccgccgccacgtcgtagatgctgatggggcagctcttccgataggagctctgcccatgtctgttttcagcgcccattctcctctccccctctccgctgatctactgaaatttcatcagaacggcggcgaagtagtcagtctgtatccgcaggtccttgtgcccggtataggaaaacatcagcacgcagtttccccgccgggccaccacgcactggcacggatcctcccgccgggagagctgctcatctccggcccaccagaagctgtccagtccggggacctttagccgttccggctccccgccgccgaaccacttctgccaggtcttgagctcttcctccacccgaagggccagccctttcgtccccatgcggtaatacgaggtgttgccggagatcagattcaacgggccgccggggccttccgtggactgccgggtccagtacatccggggtgccaacagcagggacttgcgctcagcggaaaaaccggtcagctcctccgagccctccagctcccgcagatccacatataccacctccgccagcggctcgccgtccccgtccatggccgaccgggtgaaatggggatctccgccatccgggagcagccaggatatcaggacgcccgcccaaatcaggaccattaccgcctgcgtgacccgtttctggagccgccaggatctggggcgttccagagggacgccggtgcccagcgaccgcagcagccggcgcatccggaaggcgtccagcagctcgacccccaccacggccgccgccatcagcagccagaacagtccctcgcccggcagggcatgctccagctgatccaccagaggcatgtccccggcgccccagaaccagggaaggacacagatccccaggcacaccagcaggatcgcgggcagccgcagcagatggcgccgcatttttcgctcaagatacccgtaccccatgctctggaccaccgggtccgtgtccagctccggggcggccgggtcgccgcagcgccagatgtggaaggtccccgccaaggtgcaaacatattcccaccccagctctctgtaggcatccgtcatctccggcagcggagacttctctttgcgcagcaggggctggagccggtagcggctgggagcgacggagcaatcctgacaaaagattccgtaaagcccccggaaccgcagcaggtgatagccctcccggtcccgttcctccagccaggactccacagcagccacgtcatagagctccacaggccggaactccctgtattcctgccgaccgctcatagatcgctccccccttctctttctgctgaacctccgccaggacggcggcgtaccgctccgccagatctatcgttggctccgtggtgcctgtggagatgctccacacctgatcccccagccggaccactaggaaccaatacccgtagtcgtcgcgagtggacacccaggtctcgtccagtccggggatctgccaggccatgatgggccagcctttctcctggtagtccgccaagatgccgtctaccagatcgtccgccagccaggggaaacggaggcggtagtagcggttctccgtctcccagtcgcccatgccctcaaaggtccaccactggtctgtggtaagccagttgtcccagtggatggcctggacctcctgcaatcccttttccgtgatatatgggaccggctcgtcaaaggtctccgccggttcaaagggccgcgatctggggtccgccatatcggcgcagagtgatgcgatgtaaattccccacagcagcatgatcgccagggacaatccgcaggccagccggtaaggccgcctgtggcacacgggtactcccgcccgcagaggccgcagataccgtcgtagagaccaccactgccggaacgccgccaatgcgagtgccagcagaaagccccaataggcggcctcccgccacagtggcttccactcctgcacactccatacgagaagggttctctctgtcagaagcgtctgtaccgccagcaccgccagaagcgccgtgaccgcggcccagaactgcgtcaccttttgctggcggcggaacagccggtcatatgcctgggcctctgtctccgggtccgtgtggagttccggcgcatcgggatcatcgcatcgccacaggtgcacggacttgccggaggtgtccacatactcccagcccatagaccggtaggccgccaggcgctctgggtccgggcagctctcctttactggggcaggttccagtcggtagcgaacagcctttggctcccccttctcaaagaccgccaggaagaaaataccgggaaccgagacggcaaaccacccccgggcggcctggtcctccatccgggcctgctgggcggctacgtcgtaaatgttcatgggcatcagcttcagcatggcgtttcccctctttttctattgaaactccgccaggacggcggcgaagttgtccaggtgatccatcaggtcccggtctgtccgcacccgctccatcagcaccgcccgccccatccggccgatgaagcatcggtttttatccgtgtcgatcaccaccgcttggtcaaagcggctgtccgccacctcccggacctctaccacggaccaggtgtccaagaaattcgctaagcgttcccgatacagggcctccgccaggaaggtgaaccgcacccggtcgaaaccggcccacagggacgctttaaaatcccagcggaactggctgacctcccggtgatccgtcagcagactccgtctctcccggtaaacagatgaatccaagggcagggcggcggcctccggggccactgcctccatggagacatagggcaagggctccggcgcgtcggacaagggcatctcctgctggctgccgaatacagatacggcaagtgcagccaccagtccgcaaatcccccaggagacgagattctgccgcctccgccgccgtaacgacgcatccaggtcctcagtatccggcgccatccccgcctccagctggcggcgcatccgctgaacgccccgcagcgcccgcagattgccgcagagccactccagggcacagaccaccgcaagcagccacacagcccacatccctttcaggaacacatccaccggctggccgctctcccagaggctgcgaaactgcaagatcgtccagacaacaatcagcaccatggagatcagcctatgtcgccggaacagccgcagctgcctctcccaggtcagacacagggcagagggatctgtaaacagctccggcgcctgtgggtccgcgcaggcatagacccgatagtcccccaggacgccggcaggctcccaccccatttcccggtaagtctcctcccgctcacattgggcgtcataggtctctgtccgcaggggctccagccgataccggagcttcctgggctccgccggctcaaactttccgctgccatagcgagaaaacgacaccggccgccagccctggacagctttttcctccagccaccgctccagaagggcggtatcccaataggcctccggcatgagaaaacgctttttcacggtgcctcctctctcatccccggcagcagccgctccgacgccagctcctcccgctcgccatcggccacgcagaggcgcaggcgggagagctcctgccggaacagggcccggccccggtccgtgatggcgtaggtccgcttccgcccctccaccgccgcctcccggatcaagccctcctcctgaaattttgccagaatcgtgtacagcgtccctggccccaggggtacccgaccggcggtggcgtcatccacataccggacaatctccgtgccgcaccgctcctgccgcagcaggctcaacagcacatagaacatgctctccgtcaggactttcagcggctccctggccatggtatcccccctaatatcgaaacacgatactttctgggttcactataatatcgttgcacgatattgtcaagctgtctgttcgcttccagctctggaatgttttgagggttgcagcccgccccctccctcctgtatgctcttgtacagcagcgacaaaccagaaaggacgaattttccccatgaaacgaaaacttctctgcggcctgctggccgcccttaccctgacctgcgccaccgtcaaggcggcccccagccgggtggtgcccgtccaggtggacggcaccgttctgagtcagggcgtcaactacctgcagagcggcgtgacctatgttcccctccggggactgctggatgccttcggcggctggagcgtctggtgggacagcagccgaaaggtggctgccgccgcctccggcagccagtccgtcaccgcaaacccgtcccgaaataccgtgacggtcaacggccgtacatacagcggcaaggtctttgtggagcgtggccggacctacatccccctgcggactctggccaccgccctgggcggcagcgtggcctgggatccccagctgggcggcgcggcggtgacctctcccggcgcggatcacaacgccatggacctttactggctcagccgcatcatcagcgccgagagtcggggcgagaacatgaccggccagatcgccgtgggcaatgtggtgctgaaccgggttgcggcgaaggagttccccaacaccattcccgccgtgatctttgaccgcaagcacgatgtccagttcacgcccgtctccaacggcacagtgtacctgccccccacggccaaatccgtggaggcggccaagcgggtcctgaacggcgagaacaccgccggcaaggctctttacttctacgcgcccgccctgtcccagggcacctggatcaacgccaaccgggcgtatctcaagaccatcggctgccaccggttctacctgtaattgacatttctcagccagggggctaaaatagggccatcaagaagcaaaggagcaagccacatgctgttttccgatcatccccggacccactaccgcaacgccccggcccatgaggtcatctgccagttgcggttcccgtctattctcaccatcaacagcgtggagcccgccgattttcaggaggccatccgcgcggagttcccccagtatgcccggcgccaggacgccgcgccgccccgcatcaccgggctgggcagccccaatcccaaggtggagcagcagcctccggtgaccaatcacaacttcgtctccgaggacaaccagtggaagctgaatctcaccaaggacttcatcgctctgtccaccctccactatcccgggtgggaggagtttgcccgccagctggacaagccgctggccgcctttatccggctgtacaagcccgcctatttccagcgggtgggcctgcggtatgtgaacatcttctcccgtgcccggctggggctggagggtgcccgctgggcggagctgttctctcctgcctacaccgctcccatgcaggaggcggagctcccggaggaccgctttctcaactgcgcctgtgatctgacgctgaagctggattccagctgtcaggccaaggtccacgcgggccccggtgtggtgaagcggaacgcccccggcgttccccaggacccggaggtgaagttcatttttgacatggatctgtccatgaccggaaacaccccctgcaccctggccgccggtgcgctggagacgctccacggccactccacccgcctgtttgaaggtgctgtcaccgacaggctccgggacgccatggaggccggataatctgcgaaaaagcccgggagacgtgtacggacgtctcccgggctttttgtacatgttgtcacttctggaacatgggggtggagagataccgctcgccgctgtccggcagcagggccacgatggtcttgccggcgttctccggctgccgggccagctgggccgctgcccacacggcggcgccggaggtgatgcccaccagaatgccctcagtccgggccagctcccggcccgtggcgtaggcatccgcatccgtgaccgtgaggacttcatccaggacgctgcggtccagattctccggcacaaagttggcgccgatgccctgaaggccgtgtgggcccgcatggccctccgtcagcaggggcgaggaagcgggctcaaaggccaccacgcgcacagcggggttctgtgccttcagataccggcccacgccgctgacagtgccgccggtgccgaccccggccacaaagatgtccaccttcccctccgtgtccgcccagatctcagggccggtggtcttctcgtgtgccgctggattggcggggttttcaaactgtcctgcgatgatgctgccgggaatggactgatgcagttcttccgccttggccacagcacccgccatgcccgccgctcccggcgtcaggataatctccgcgccgtaggcggcgatcagagcccggcgctccacgctcatggtgtccggcatggtgagaatcacacggtagccctttgccgcagctgcggcagccagaccgataccggtgttgccggaggtaggttcgatgatggtgccgccgggagccagacggccctccgtctccgcccgggcgatcatgttggcagccacccggtccttggcgctgcccgcgggattcatgcactccagcttggccaacagcacggccttcaggtcgtggttccgctcgtaattgcacagctccagcaagggcgtgcggccgatcagctcagtgacgctgtgataaataggcattggaaatccctccgttctgaatgaatagcctcatgatacacctgccgcaccgggtttgcaacggaccatttgccgaaaatccgcctttaattcatagcatttttataggatatggaagaaaaaaagcggaccgccgacaggcgggccgctttgagatggtatactcaggccaccacggggatttccacaatcccggcggcaccggcggcgatgctgtactcggggaacaccagcgtcacagagccgtcctcattcagatagaaggaggtggcgtcatccacagtggtgaagccgccctgctccggggtgaagaagaggccgctctcatccgccgcgatcttcgcatttacggcgtcattgcagatgccgacccagtcctcgcccagcacgtcggccagggtgatgtccttgtcgttggccaggtccaggttgtagcagtaccgctgctgcatggcagcgacccagccctcagcgaaatccaccacaaaggagaccgtagtgtcggtctggctcttgatctcgtagtcgataagcacgttcatctcccggtcggcccactcttcctcggtgccgccggtagccaggaatgcatccttgtaatcatcccagtccgcctgagcctgggccagatgggcgtccacccgctcctggatctccgcgttgaccttctcggccaggtcgccctcagactccacaccggggacggtcaccttgtagtcgatgccgttctccacggtctcatagtcccggatcgtcaggacctggaacagcccgcccagcaccggtacatccgcagccgcagccgcgaaggtcggggagacattcaggcccgccatcagcacagccagacaggcggccacgctgcccgcagtccgccggaccaccttataaccgcggctacggctgctggtcctgccctgccggatgcctgcgcggacccgggcgtccagctcctccggaatgggggtggactcatattcttctcgtgcacgcttgaattcgttcataattgatctccttccattgatatccgtaatttcttcaagccggtgtacagtctggttttcacggtgttcagattccagccggtgacggtgctgatctccttgagagacaggtcctcatagaaccgcagcttgatgatggtccccacctctggcggcagagcgtccacccgttgggctagcgtgccgtccgaaggcagagggtcctcatagctgccggcgtccagtgcctccggcgggatcagcgtcacccgctttcggctgcgaagcacgtccatgcacacgtgaaccagaatgtgataaaaccacgcacggagggcctccggctccttcagctccccctgtttctccagtgccctgcagacggcggtctgcaccgcgtccagagcctcttccctgtttttcaggtagctgtacgccagtcggtaaaaccgcgcctgatccgttacgagatagtcggtcagttgcttttccaggatatgtgacacgtttctcatggtcctttccgttcgttctgctgtatagacgcgccgggagcggaaaaagtttggagggagaacaattttctgaaaaattttctgcgcaaaaaagagaccggtctcccggtctcttttcatcggctggaatcaatcgtaacgcagggcgtcgatggggttcagcttggccgccttgttggcggggagatagccgaacaggatgcccaccgccacggagacgccgaaggccacaccgatgccgccagccgtgggcatagccacgaagccatcgttgccggtgcccagcaccagagcgatgacattggtcagcacgttggccatgaggatgcccagtaagatgccgatggcaccgccgatggcggaggtagtgccggcctcaatgatgaactggctacggatgtcccggcatttggcacccagggattttcggatgccgatctcccgggtccgctccgtgacggacaccagcatgatattcatgataccgatgccgcccaccagcaggctgatggccgcgatgaggatcaggatcatcatcagggtgttcagcatggagtccatggcgtccatcatctctgcggaggtcatgaccatgtagtagtccgaggactggtaggtcttgaacagccggttttcaatgatgcccttggcagcagacgccgtatcccggtccgtactggtcatcagatacatgtccccatatccgccccccagccgctgggcattggcataggggatgtagatcacatcatcgacgctgccctcggtgctgtcgccgctctccgccagtacgcccactaccatgtagggcacgccgctgacggaaatcgtctgacccagcggatccgtccggaaagcgttttccgccagataggaaccgatgacacacacattctgatggcgctccacgtcaatgtagcggaggaagcggccattctccaggctggagccctgcatggtcttctgggtgtcggcgcggtaaaatgcctcgctgacgccgtaaatgctggtgcggtcgaagtcctccgttccctgccgcaccttggctgtggcggacacatagggcgtgacgccggagaggtactgggggtacttctccacaagcgcgtacatatcttccgtgctcacgtcccgggtgccgccctcgccgcggccgtagaccatcacctggatcaggttggagcccagctgctcgaactgggcgttcatgtaattctgcatgccgttgcccaggctggtgatgatgatgaccgccgccacgccgatgatgatgcccagcatggtcagcagcgcccgcatcttgctgagcagcagggatttgatggccagcttgaaggattgggtgaaattcatgccggctccccctctcccgcgtcctcctggggctggaccacggcctggggatcactggcgtccccgtcgtagatgatccggccgtcctgcagacggacgatgcgcttggccttaacagcgatggagttgtcgtgagtgatgaggaccacggtgtccccctcctggtttagcttctgcaggaaccgcagcacctcccgacccgtgcgggagtccagggcgcccgtaggctcgtcggccaggatcaccgacggattccccgccagggcccgggcgatggagacccgctgctgctggccgccagagagctggctgggcaggttcttccgcttgtcagccagacctacccgctccagagactggatggcccgttcgcggcgctcctctgcggagacgccggcgtacagcagcggcagctccacattttcctgcaccgtcagcttggggatcaggttatactgctggaagataaagcccagcattttgttgcggatctccgcctgctggtcgtcctccatggtggacacatcaatgcccccaagtggtaggttcccgacgtgggaacgtccaggcagccgataatgttcatggccgtggacttgccggaaccggaggagcctacgatggccacgaactccccctgatccaccgtcaggttgatgccgtccagggcgtggacggtctcctctcccatgtggtagatcttgtagatgtctttcagttcaatgagatggctcacgggatcagcctcccatcatcatgtccatcaaactggaagcctggttgctgatgaggaccacatcgccctcctccaggccgtcggtaacctcgatatactcgtcatcgttccgacccagggtgacctccttggtctccagcttggtgacgtccaccacgctcaaaccgtcctcactgagggcgccggggccgggaacagtcaccgtgttgccccgttccaccgcatccacggggatgcacagggcgttggggaccacttcgccgatgatctgagcggagacattcatgcccggccgcagatcgccgtagtcctcaatgatgatggtgacgggatagctggtggcaccgttggcggtagtgccgttgatgctgaccttatccaccacgccggagaacgtctggccctccagagcgtcggcggtgatccgcacctcctgccccacttctaccttgccgatgtccagttcatccactgccatctccagctccagatagctcaggtcgtaaatcaccgccagcgtgccggaggaagcgccgtccaccttgtcgccggccttgaagttcttctcaatcacggtgccggcaatgggagatttgatgttgtagtcatccactgcgccggaggcagtgctggcagagagctgggcggactggaggttcagccgtgcgctctcgatctggtcccggatggtctcggactccacagtgcacagcacctcgcccttggtcaccgtgctgccggccagcttggagaaatcgttcaccgtgccggaaccggaggcatacaccacagaagaggcgggcatggacaccggagcctggccgtagctggaatagctgccgatgatggcggaggcagtgacggcgtcggacaccgtaccgggattgttcagccgcacccggacggagacggcctccttgccgttgctggtgatggtggtggagttggagacataggtcaccgtgcccatctgagagccggcgtagccgtccacaaacacggtggcggcctgccccacatagaagtcactgggggaggcaaaggggaacaggaagtcgatggacagctccgtgctggccacgatcttcgccagctgcgtcccagcggtgacgctctcgccgttgtggacgtagatctcgctcaccgtgccggagatgggcgccgtggggtgcagggcctcctgggcctgctgataggacatctgggcctgctgcacggagatctgggcccggtccatggaatcctgggcgtcgctgctgtccatggtgtagagcagggtgtccttggtcacaaggtcgccctcttcaaagggagcgctgacgatatcgccggagagcagggtggtgacgttgtaagagtccgccggctgcagcgtggcggtgccggagacgctgaccgtcagatcctgccgggtgacggtggacaccagatagctgctgctgagttgggtgttgacgtttttggtcagtctggacacgcagcccgccacaatggcgatcaccactaccaaaataatcagaattttcagccagcgcttctttttcttgccgccaaagcccttcagggagaatttctttttctccgtcttttccggcgcgggcacgctgggcgcctcggcggaggtctcgttcatccattcagtttccatgttatgtaatctccttgttctcgatttccgcggtggggcgcttccccataccgcgcttgaagatgttcagaatgttttccaggcgatcccgggtcccgggatcgccaccggcctgcaggccggtgtaaatcatgggagccgccacaaccagcagtgtgcccaggatgtcgcccaggtcccggtcctgccgcaggtccagcaggtccggattcaccgcgccgcccaggcgctggagaagcgtttccgcatccagcatttccagcagcccattcttctgcatcccgctgttgcagcggatgattccggtcatggcgccgatctctcccaggtgctgattgtcgatttttgcctgcacgtaatcatacagatccaacagcgcctgaaaaatgtcgccgccgtttcggagcagaaactcctccagcagcatgaacaactgatccacatatcccttcagcagatagcggaacaggtcctccttatcctgaaagtacatgtaaaagctgccccgggggatgcctgcctccttgatgatctggttgatggacgcctcgttgaaaggccggtgggaaaactcccgggtggccgcctccaacaacttctcctgcttttccgccggcagattcaaaaaagtgctgctcggcacgctgtttcatcctctcttatacgaaatagaaggtccgttttcttcagcgccgcccctgattttataccttcctcccgggggaaggtcaaggggtttccggcgaatggaaaaaagaaacatgacaacctgtcgcttatcatagctgacaagttgtcatattgcaagagggaattgcgaaaattcacaaatatttcacagtgtttccgtcacttcatacagaggtcggacccgctgatagggctgaggccggtactccaccgaagcgatccgccgtccggagacaccgtacttgggggagtagccgaatagatccacataccgatccaaatcgtcccgctccgccgccatggcctccagcagcaccgctgcggcccgggcgtcatccaccgcccggtggctgttcaccgcctgatcctccaatccgtaggctgtgatggcatcgttgagcttgtgagggtaatcccgccggtcccggtacaccgtgaggacatccagaaaccggggtgcccgcaggacatccgcccgcccgaagggccgcaggaaatgatagaggaagttcagatcgaactgggcgttgtaggccgccagcagcgtccgctctcccccgcccaacaggttgcagaacgcctcacaggcgtcggccttctccacgccctcctgttccagctgctcttccgtgatgccggtgagctgggtgataaagggcggcagcgtccgccccggggagaggcggagcagcaggtccatgcagtccgtctctccctccgcggaaaaggcggcggcccccagctcgatgatctcgtcccgcccgaattcgatgccggtggtctccgtgtcgaataccacgatccggtcaaattgcttccaaaggcctgtctccatggcagtccctcctgtcgaatgttgtcttttcagaatagggcggccagccggaattgtcaagggggtgccgccgttgactttctcccccgggccggataaaatgaaggcagaatctcggagaggagggtactctgtgaagcgcggacttgacaccgcctcctaaaatcaaccaattattttaggaggcttatatgaacgacaatttctgcccgtcccacactgtggtggaactggatacctgggaacgaggccctgtattccgtcattttatcgacgacctgcgctgtgtcatgagcctgacggtggatctggagatctcccgattcctgaagcagctttcggccagtggcttccgcttctaccccgccatgatctgggcggtgtccaacgtgctcaacgcccacgcggagttccggtacggctgggacgatcaggggcgactggtcctctgggaccggatcgagccctactacgcccacttccacccggacagggagacctttgcgaagctggtgacgcccttctcttcggacctggagaccttccaccgccgctttctggaggatcggacacggtacgccgccctggaccacttcgacctgacggacgtgccgcccaacacctttgatgtgtcgtgcctgccctgggtccggtaccgcagcttcgacatgcacatcttcgacagcggcacctatctggccccggtggtcacctggggaaaatatgaacgggagggagaccggacgatcctgcccgtctccctgaatatccaccacgccgtggcggacggattccatctgtcccggtttttcctggagctacaggagctgctggacgcacctgaaataagctaaaacagacaccgggcggcccgctttcgggccgcccggtgtaataatttttcaattacttccagatactcttccggatgactcggtacaggagaatcatagctgccaaaattccgagccaaattgctccgttaacggcgagtgcaaactccagcggccaaccagtccgggaattggcagtaatggtataaatgacatcttttaccgccagatagagccaaagtagtccaccgcaggcccagagaagatcaaagacgtgctttttcaaactcttcatccgctcccaggccgtttaatcgttgaacttgtcgatttggacgctgtcgcagtactgggctttcagctcctgaagacggccgaagatctccgtctggcagtgggcctgctggagctccggcgtggtccagctctccaccagcagcaggtcgtccggtgcctccgccgccaggaagtagtcgtacttcaggttcccctcctctttcagggagttggcccggatgcccaaatcacagagggcctgataaaaggcctccctttggccggacttgcagtgataggtgacgttccaagttaacataagatatccccttccattttatggtcaaatttcttcacttgcgcactctgtttccgtcaaaagctccggcgccagccgggccatgtccgccgggatgggcgccgtcagggacagatgctctcccgtcaccggatggtccagatccagagcgtaggcgtggagggccggccgagggatcaggtccgggtcctcttccccgtacagccagtcccctgccagggggcagccgatggaggccatgtgcacccggagctgatgggtccgccctgtctccggccgcagccgcaggagggacaggccgttcgacctccccagcacctcataatgggtgacggcccgggcaccgtcaggccggacgcaccggcccaccacagaattcgggtcccggccgatgggggcgtcgatggtgccggatttcggatccggacagccgatgcacaccgcccggtactcccggcaaaacctctccgtgtggagcgcgtaccggagccggtcgtggatgtagccgctcttggctaccaccatcagtccggtggtgcccttgtccagccggttcaccgggtggaacacgaagtccgcgccccgctgccaggccagggctccggccacggtgggcgtgtccggcaggaaattggaggcgtgggccgtcataccggcaggcttgttcaccaccagcagatggccatcctcccagacgatgggcaggggccagggccccggcgtggggcgcacccggggcggacggtggtcgctagtctccacctccagcacgtcaccggtgtgaaggatatccactgtacgggcatggatgccgttaacccggatgccgttctccgtccgggtcagccgggatatggcgtgggaggagacatggagcgcagccttcaggatatgccggaccgtggcgccgtcctgttccggcggcagggtatatgaaatcgtctccatcagacacctctccttcggcgcagcagaaaaatcccaagcggcagacaggcggcgtccaaggcggagaacacaccccacagaccgctccagtaccaggccgccgtgtcgaacatggccaccagcagccgatgccagaaaagcagctccgccgcgatggcgaggaggtcgaacagcacgtatccaccgcccagcaggtaggcccccgcccccggtgcaggcagaacagaaggaacgacagggctcaaaaggccggaactcctgcatggcaaaacctcatttctctgttattgtactctgacgccactctgtttgcaagggttttggctctggtaaaacgccatccttcatggtacaataggagcagtttttttcaggaggaactcccatgctcttatccgcagaacatctctccatcaacttcggcagccgccagctgctggatgatgtgaatttctatctcaacgagggggacaaggtgggcgttatcggcatcaacggcaccggcaagtccacctttttgaaggttctctccggcgtcacggagccggacggcggcaccatctcccggaaccccaacgtccaggtcagtctgctgcctcagaacccggcaatggaggaatccgccacggtgctggagcaggtcttcctccacttccccgccgagttccgggagctgaatgagtatgaggccaaggccatgctgaaccggctggggatcacagactttgcccagaaggtggggacgctctccggcggccagcggaagcgggtggccctggcggcggccctgatccacccggcggacgtgctgattctggacgagcccaccaaccacttggacagcgagatggtagcctggctggaggactggctccgccggttcaagggcggcctggtcatggtgacccatgaccggtacttcctggagcgggtggtgaaccacatcacggagctctcccaggggaagctgtaccactatgaggccaactactccaagtacctggagctgcgggagcagcgggcagagatggtggaggccagtgagcgcaagcgccagtctatcctccgggtggagcgggagtggatcatgcggggctgcaaggcccggaccaccaagtccaaagagcggatccagcggtacgaggccctgctgaaccaggaggcaccggaaacggacgaggccgtgcagatggcggcggcctccagccgcctggggaagaagatcatcgagctgcgggatgtgtccaaggcctttgacggccgtcccatcgtcagccgcttctcctacaacctgctgcgcggtgaccgcatcggcatcgtgggccgcaacggcgccgggaagtccaccctgctccacctgatggcaggcgaactggcaccggacagcggcacggtggaggtgggcgccaccgtgaagatcggccacttctcccaggagggacgagagctggacctgaaccagcgggtctacgactttatccacgacatcgccgatgaggtcaggaccgatgagggcaccttctccgccaaccagatgatggagcggttcctcttccccggtgatcttcagtctgtgcccatcgggcggctctccggcggggagcggcggcggctgtatctgctgtccgtgctgatggaagcccccaacgtgctgctgttggacgagcccaccaacgacctggacgtgaccaccctctccattttggaggattatctcctgggcttccccggccccattctggcggtatcccatgaccggttcttcctggacaagctggcggagtccattttcgaggtccggggagacggggagatccaccggttcaccggcaactggacggactggcaggccaagcgccgggcggaagaggccccctctcccaaggcggaaaagcccaagcccgcggcagagcgtccccgggaacggaaactgaaattcaccttcaaggagcagcgggaatttgagaccatcgacgcggacctggcggagctggaggctcagatcaccgcctgccagacggagcaggagagctgcggcagcgactatgtgaagctccaggagctccaggcccgtcaggcggagctggaggccgctctggaggaaaagacggagcggtgggtatatctgaatgagctgaaagaacagatcgacgcgcagaatgggtgaggggcctttcatcaggaatcggcgttctgcaccgtacgtacaagtattctgtcaaggggcggtatctcggcggaatagcactttacgccttgtgttatgaatatcaaaatcgcggaggcccttccaggcgttggacctggaaaaagaggggcattgcctgtgggcaagacgatgtccatactctctgcgaagcattggagataccacgcggcacactctgcaatcacattcttcgcaacaaacgagcgaatgcccagtttgagaaacgcagggaggaataccgccttctgatctgtgaggtctttgctgaatatcggcaggtacttggcgctgaaaagatttggatgattctcgcacggcgcgggcatcaggtcggcgccaaatttggcgctgacctgatgcgggagatggggttatccagagtttgaaactgcgagaaccggaggagaagaaaataccctccgtcagcaattttcagcagacaagcaatcaaatccgggccagtgatgtggcctgttttaagtatagagaatcgatatctttatatctgcgtgatcttggagctattttcccgtaaagtgatcgcgcacaaagtttcccgaaaaacagcacgcagctcattacggctacattacaaaatggcgtatgagttgcgtaagccagagacaggattcatttttcacagtgactgcggattttgtttgactttgcaaaaggccgatggatttccgtaaggagctgatggccgtgagacacagaggttcagacttagaaaatcagactgcttgcagccagaatttgaactgttcccatttttatgtcacattttactttcgaatacctttcctcaaaaaagcttgtgctgcaaggatttcgcacataaaacagccctacctaatctgataagtcctacaaacttgttcagattgggtagggtcgtttctcttattctatcaatcgaacttaggtgcggaaacctcgtttccagcaaaggtattggggccgggattggagagggagaaatacattttcgccgccttggtcgtaccaaaatcccggttggagccactgtcctgcacctcgttgaaggcatcccggaacatctggttgtgagcctcctcccggttgagcaggaagtcgatggtttcacggaccttcttgtcgtcgatctggcggtacaggtattcatagaccaccttggcccgctgctcagaagcgatgttgctgagcaggtccgcacacagatcgccggtcacggtcacataatcgccggtccaggaatagccggaggcattgattaagccggggttcaggcccaagatcacatggctctggatctcgcccgccttgacctgatctgcatctacatcgtggccgttgagcagattaatggtctgggccaccatttccatgtgtcccagttcctctgctgcgatatccagaaacaggtccttgatcttctggtccttgatgcggaagctctgggacagatactgcatagccgctttcagctcaccgttgccgcctcccagctgctcctgcagcaatgctgcatactggggattcggccgctccacggccaccggatggaataactgcttttcatgcttaaacatatctaccgctcctttttcgtggtaattcttagtttgcttgatatgctccgaaatataccggcagaaagcggctcaggagatgctaggccgaatcaaggaatagggccatcagtcgcggaactgcagctagagcaaacaattttaccgcgtacatttacaaagcaatcgataaaaccgagcggtgaatcattttatcgctgttcaaaatgggaagcaatgattaataatcggcagcagaaatcggtgataaacacaaagatgaaaaaatgggaatctctacctcagggaccatgctaaaaccggagcttccgccattgttgagatatcggtcaaaaacctttcctgagcgacggaaaaggtaagatctgtcggatcattcgctgtgcctatgcttgtccacagttcagcaaactgcttcaggaatacgaagcaggcggcaaagatgctgtggatgataaaatcatccacacgcttcgcaaaagattccccacagctaaaatcatgcccgacctccttgtagaagcccaacacagtacggtccggatctttgaagttatgaaggcaatcacggaaaagaaggataagccgtgaatgcaatcgcagaatttctaagagaggaaagagtaaccttttccgtaataccacagccagatgcctttgcgtgaaggtgttgacatgggcaaacgggaatgtgaaatgctgcgcagtgcgctggcctctacccgttatgaatacccccgcccaaactgaacagatatctgtcaccgttcagtttgggtgggggtattcaaggagcgccgggtatgggcggccgcctttgtccgcttatctctccgcttggacagccatgcctctgtctcatcaaacatgcgtctcaaccggttcatcagttcctctcccagccgctccgagaacgccccacagagtttcttcctgctcagatgtgcctgttccagaagccagtccagtttctggttcaactcgtctctttccgctttcagacactcatattccgcccgtgaaatggttaccatctccaggggtgcttgtcccgtgatttcttccgtttttcatgggtgaattatgctatattggggccaaagcgttcaaaacctccagtgctttcagccgtttcctaccccaattatatgtaggccactccccgggcggcgaacctttgaccgctccattttcaacccctccatcagccagcggtatcgctgcggcgtcaaccgccgtacctccttttcgttttgcggccgttggtatgcgcctgttccagccgcttatagcttatacagcaggatgcatccatcccggtccctgcagaactccctgatgcagtccagccgtctgccgcagagcagaaacagcgtattggtgaacgggtccggtttaaaccgttgctgcaccatggccgccaccccatcgattcctttccgcagatccgtatagctgcaggcgagatatataccttgtctgctctggtgaagttacgcagcatgatttcagtacctggcaaatcgtccacactgcagccgtgtccgcacctgaatagatgcctgctttcccttttccgttccggatgcttgcaaccactccaccccctctctcccgctcaggcagcaatgggagttctacttcgccttatccgtccctacctttgacagttacatcacctataccgtgatgtacgatgcggagggaaatgatctgtccaccatggcaggcatctggacgtcggcatcattgatacgagggctctgcggcccgaactgacacgcggcgatacccagtccatgcccaaaaaggggaacgggccaaccttgcggatggcccgttcccctttttcaggaaatttggaggaaaagaagtatatctatatgaattttattgcggatgtactgtgaatacatctccgtcaaatgtaatatgtacaacatccgcatttttcagagcgaccgctttctcagaggaaccgagggcttctgcaagcagttggacggccaattccgaagacactaccagaacattgccgccgccgtggctgtaagtttcctcacagattgtctggagggcgcccgtgagacgctggcgggcgctttcatagttttctgtcataccggtcttgtctgcggctgcatatgcggcgagacgggcatgggcagtgggctcttcccctgccaaagcatccgcaaccgcacgcaattctccgtcaaaatagccgcagcccaccccacgcagatccatgttctgattgaccatgagatcgggatttaccgcgctgttttccacgatgatccgtgcggtatggatatccttgaattgatcgctggcatacacggccgcaaactccagattccccagtgcctttccaagttccgcagcctgtgcctgaccgttctctgtcagtgcagtatccagctgcccattcaaacgcatagcggcatctgccgcggtttcggcatgaacggttagataaatctccaccggatcaggagattccattttttcctgggctttctgtgcatagctcagatcattaaaatccaaaacggtgtatgtatggtctttgtactcaatcaggacaatactggagttgtccagcggctccagttcctgctcctgcataatctctgctgcgatcatgctgttgattccaccgtgggccaccatcaagatatttccgccgccgttttgggccctttcctcacagatcctctggaaactttcaaaggcccggtctttcatctgctcataactctcggccagtccctccggatccttttcatggaactggtttgtgaattcctcagttgtcacaccgctgaactgcataccctcgtccgtcatcagttcggcataactcatcggctcataggagccgccatcgacctctttcaggtcttcgacaggtatgatctccagatctctggatgtctgactctgggagaggatgatgcgcgcagtttcctgggtgcggcccagcgtactggcataggcggcttcaaacttgacgccggagagccccaggcccacggcatatgctaccttgcgaccttcctctgtaagcggcgtgttgccgcggccgctgacaaagcggccggtctgattcgtcaaagtctgcccgtgacgggtgagatagacgtataccggcgcctcttccacagccccatcctgaacgggctcctgcacaggagctgtgtcggggggctgctgggaacaggcggacagcagcacacaggccagacagaatatactaaatgtcttaaacagacgtttcatggcaacaagcctccttacttgccctgatagcccagatcgtttacctttttagggatggaaaaggattcagagatgtcgtgcaacggagcccacacttggttgaagaaggggctgcgggcggcgacggctccataattccaagcattgcgctcgcactccgggcaccagtgccctccctttaatatcaggttcggactggcctcaaattcgtgtccgaacgcgcaacgccagcgcacgggcctgtagaaatcaccggcggtataatcgaggcaggcaccgccacggaactccgcggcttccttcatgtcgttcagccccagctgctccagtggcttgctctcatcatagccgtggttcagatagaccggtgtgcggctgggctcggggaattccacctcatcccagctttttggctgtgccaaggctgccgcccggcttccaaaaaaggcgcgcacccagtcatcgtgtccctcttccagcatccacagcgttcccatctcctgatgggcaatctgctcgtgcatggccttcatccgctcctttgtaggcagggccgcagcatccccgtttgcaatcatcgtctccatggcctgccacgcgccagcgatatactgctgataggtcatcacacggaacctcaggatatcattgagtgcgtctgagtccgtataccactggccatggaaattgaatcgggcaaaccatcggggctcaaatacatccttgaatccaaagccaaagggtttcagcatatcatcaaagtattgtatatagttcagccgaaagctctcgccgccgccaatgttgtaaatgccccgccagaacttctccgggacccaatcctcacatacgtttgccaggaggagcccagactcgatggaagtcacccattccaaaagattctgcggcggctgatggaaaatgatcggttcccgggctgccgactccttggagggcataattcctgtttgacgcagactcacccaatgcttgagcccggactcaatgaccgctctctcggcggcgattttagagactgcgtaatagtcaaatgcagatcccttgatgggatctccgcaacgcccccagtggatagggggcagacggcagccggtctctgccactgttccgatatagaccagtttgatcgcatccggatctggttgtgccttgatcgcccggatgatattcatagtcgatccaaggttgacctcaagactgcgctgcggcagtttatcggcttcgggagaaacgaacgcccccacatgcaacacataatccgcgcctgtcacacagcgcaggatatcgtcgtagcagcagaggtccccccagacaatctccaacgcagcgtcatgttcatagcgggacataaatgctttgttcttagcggaaggccggaccaaaacgcgaaggttgaagcggtcggaccgggataggatctgcttgaggccctcctctcccatggtgccagtggcaccagtaagaaatatgatttttttacttaacatgcttgttcagcctccttaccttacttactgccctttttgacaatatcctcctttcaattttgaaaggaggatattgtcatgtttactctgcgcgataacacacatggtaccgggcaattttgccatctttttcttccagcagctcgccgcggcagggtatctcaataccggggtagcagatgatgtaatccagaacattgccgttgagcgagaccggcttggcactcatgggcattgagtggaaatacatattgaaaatcatgtccacgccctcttttcctctgacaaacatagggtccatgcctgcacaggtaggagcggtgtcatagaagatgcaatcgtcagcgaacagttcagcaaacagtttggagtcgtttttattgaagacttccgcataattggtcagtggattcatagttggattcctccttcaatttttatcacaatccctcggtgcgcaggaagccgtccgttccgccgtcggcaaaaatgatagcaccgcatatcgccacagactctggactcagcagaaacagagcaaccttggcaatatcatcagcaggcaggaacttgccggtgttatacagcatggggatagggtagttaatcatgttggcagagaaatccgggtcagccacaccctgatccatcagctcagtctgcgtagcgccgggagcgatggtgttcatgcggacgccgcgagctgcccaagaaccggaccagcggcgtacccagcgggcgatagcattcttggatgcctgatacgcctgatatttggcaggtccctccagtgttttaccataggcaaccgctgcgtcctcatcgttttggttcaacatgatgtccaccagttcggtgttcagctggggcagcgtggcggagtttgaggacaccaccaagatgacgtccttctttttctccaccagcggataggcgccttctgtcatttctctggcagcaaaatagttaatgctgacgatgacatccgcaggctgggtggggccaacgccggagcaggacacgaagccatccagtccatctggcgccgcagcatacagcgcctccagtacccgtccccgctctgctttcatcgccagatctgcggagatgttgacgtccgcagcgtcttcagcagcggcccttctggaaatgttgatgacatagtgtccctgagccttcagctgtctgccgattgccgcgccgatgccggatgatgctccggtgattgcgtaaattcccatattgatgagacctccttcatttttatcacttcgcaccttcagaatgcgaaggggaaaacaaatcaaatagagagggcggcccgataggcttcatggatagcgtttagagccagccgcggcgccgccagtgcgtcgcccaccacatagcagggaatccctgcttcagcgcaggtatcctgtagatcctgagagggaaccggcttggacccaatcgccatgaccacaagatctgccgcaagcatccgttccttcccatcctgctccacgataacttcgtccgcccggatttctttgcaggtggtatttaccaggacctggatatcttcctgcgccattgccatatgtgtgccgattttccgcaattgtcccagctcacccaaaactgagtctttcatctctacgaccgtcacgctggaacccttcccagccagaaattcagccacttccatgccaaccagtccgccgccgatcaccacggccttgcccgcggacacatctttctgggccagaagtttatgagactccacgacacaaccgctgtcagcacccgggatattggggataatcggcttggagccgatggcaatgatgacggcgtccggtttttctgccgcaatgagtgcgggtgtcaccggcgtgttggttcggatctccacgcccaagtcacggatgttttctgccgccatgtacgccgcccgttggaaatcgcctttccggggcgcggcaccggccagcacaaattgtccgcccagagtgtctccggcttcgcagaggattggatgatgtccgcgcttgtatagggcatctgcagcctcaatccccgcgatgccgcctccggcgattaggactttcttggcctgaggggccggacgcagagccatggtctcttcctccagaacagcgggattgcgcaggcaggtaatgtgttccagcgagggatcttccaggcagcggcagaaatagtcatagcagccctggtcgcagccgatgcagtatttgatagagttcagctttccggccttagccttgttgcagaattcgggatccgccaactgggcgcgggccatgaccacaaggtccgccttgtcctgcatcaggatatcctcggccatctccggcgtgttaatcctcccgcagggcatcgtcagcagaccggtctcccggcggatacgtgcggcaggctccacgttgaagccgtggggaatgtccacaggtgcaacttcatatacggtagctgcagtcagaatgttgccccgggagatattcagcacatccacaccagcgtctccggcgcacttgcagaaatcaatgacctcttcaatggtcaggccgccttccagcatatcatcctggcagtctatccgcatgaacaggggcatcccctccggcatattggcccgaatcgcctgaatacaggccaaaggaaactttttgcggttttcaaagctgccaccccatccgtctgtgcgccggttgatcccgccagaaaggaaagaatgcggcagatagttgtgtgcacaatggaactcaatgacgtcgatcccggcttctacgacgcggcgggccgcttggccgaacgcttcaataacggattgaatgcgctcctctgtaatgccgggaactgtatattccggagagagcggcatatctgagggaagcaaaatctgcgcctgtgggtcgcttgctacggcgaggccgccttgccacagctgaacagcgacacgaccgccagcagcgtgaactgcgctgcacagctttttcattccgggaatatatcgatcatcggcgatggagaggaagccagtaggggcgcttgcggcatccacagagcaaacctcaatggtattcagcccacagccgcccttggctcgggccacatggtaggcaatcagtttgtctgtcaccatgcgcccgtcttcgctggccgcactctcatgggtgcccatggcggacatcaccacccggttgcgcagctccaactcccggatcttgatgggagaaaatagtttctcgaatgacatttttctgcctcctcaacagctgttcctgacaattgcgcatactagatccgctctgtctaccgtctctgctctgtgggagacaaagggatatattctgtgcaattatcataagtgaactcaaattttatcttgtctgtatatttattataacagcaaaagaggctgcaaagatttgaaagaaatcacaagttacttgcagcgatccttttaaaaaaacagattcctcacaggagaatcggaacggttcttgtagatttgctctgttcttcctggcgtatttccaaaatatacttcaaggtctgtgtgcaaaaaaatccgaaatgctcccgcttttttacaaaaagaatatatgtattgagctcggagtaggtaagctgtataatcttctcaaaaaggaagaacggaggatgccgatggaacagatcgtgagaatgctggagaagccgcagcggtattttacagcccacgcctcttggtacggtgtggttcagacctataccgtctcagaaataacaccgttcttttgggaagacgagtgtgtgatgttctacgttcgctctggttcaggctttctacgagtgaaccagaccttatacccattaagccaaggctgtttttgcagtatgcaccaatttcatgtgttccggtttgaagcgtcttcagaggagcctctgtgcatggaagtgctcatctatccctacccggagatggcctactttgtcacaagctttgccgaagatgatttggcttttggggaatctacagtggttctgcctgcctgtcaggtggatcgtgagctagtcgagcaacttttaagcctctatcgagaggaagcccagtgcgcagacgaggacagtcggctgatccggctatgcatctcagatcagctgcggcttctgtatggaactgctgtctccgtggctccgcttttcccaatgcccctgtgtggtcagattttcctttatatagggcagcacagcctgaaggcactgacgcctgcctctgtggcagagtcttttcacatttccacactccagctgaaccgagaattgcgccgggtttgtctggaggggtttaacgctgtgctgcgtcatgcacaggtatgcaatgcatgcgcttgcctgctgcgcagcaatgttactggaaccatgatggcaaaatttgcagggttcaagagtgaaagtgcactatatcgggactttttgaggttgcggggagcaactccgcagcagtaccgtgaaaaaatgctgctgaatagaacccaggcccaggggctgatcaatgaccagctctcagagatccaagtctatgtgatggagaattttcgatcttcggtcacatgtgatgcctgtgcgcagaaattattcctgaccaagagtatcatcaaccgcctattgagcgaaaaatatggcccggatattacattccataaatatgtcaaccgtattcgtctgcagtttgcaacggggctactagcttccagcgacttgccgatatgtgatgttgctatggaatccggattcaactctgtgcatacattcattcgcttatttaagttggagtgtggtgagactcctgcgcaatatcgggagagaaagaagagggattacgcatgattctggaaggcgggaatatatacaatcacagtggcttgagccggaattggctgcatcaggacatgcttcccggcaatgttcaaatgcgccgccaggttgtatacaatgccactggctatcattatcaggaaggctgtcagtttattttggtagaccatggaggcgggtgcctcatagtcaatggggatgcctattccctggaggccgggagttgctgccttttgtttgttcaccacttttacagtattaaaccctcgcagtccgttccgctcacacttctttcttgcctattttcctacagcacatatacctttttaactaccatttcacaatttgattttctttctattgatgttccgtcgccaccgaactttgcgaatttttctccgcaggagatggtacatatccagcggatcgttgccgcactttccaagccgggaattggtgccaacggaaaaagcattcccttcctgctggaatggttgaccaggcttcatcggcagattggtcttaataaatatcattcaacttaaataccacaaaggctgggaattactaaaaccaaaagcttatgatgccataccccacggcccggtcagaatccgggctagccgggaggcgttcgagcgctccaatgaagaggaatgaatgtggaacggaggaggacctgctgccctattatgctctgttcggcctgccccgcaagctccggacgctggaaaagacgcttgagagtatccccaaagctggtcgcaggataccaggatgggctacttttgtgatgcctggctcctgctcacccaagtcgccggggcacaggaaacggtctgacttgtcctatccgagcagttcccgctctaccggtcggatggggcgtacgaccccacagagctggcggactggttccaccagcaggcaccggacatcgcataccgctttgaccagcgcaacggctatcctgctcatcaaaagaagatagagacagcttgggccgggacacaggagatggcgaaccagagcaattagatgaacctggccggttgtcaaattcagaacacctacctaagagacaagcaagatggcctccttaaaccggaggccatcttgcttgtctcttttcaaaaaaacctgcactcagtcaaaccatttttgttccagaagaaaagtgaattggtgtttaagaaagattcgggaattgtaaagatacctccgcggcaatcaggtaaactgaacacactatctgaatggagggattttaatatgaatatccgaattttgagtacagaacagatcaccgcttatgacacttatctgcgcatagaagagcgggccgctggcacccgggagaagtatctgcgggatgtgcaggcttttgtctgctggctgaatggagccgccgtgaccaaagaggctgtgactagctggaaggagcggctgctggccgagcaccgggcgccttccacagtaaacgcggccttgtccgccctcaacggcctgttccgttttcttggctgggaggactgccggacgcggtttgtcagggtgcagcggcggctgtttcgggacccggcccgtgaactgacccgcccggactatgaccggctgatcgccgcagcgcgggaattgggcagggaccggctggcgctggtgatggaagccatttgctccaccggcgtccgggtaagcgagatccgctatctcaccgtggaagccgttcagcggggccgggcggaaatttctctgaaagggaaagtccgtaccattcttattcccaccaagctggcccggaaactcttgaagtacgccaagaaaaataaaaccgtttccggcgagatctttctcacaggaaacggcaaaagcctttcaaggcggcagatatgggcagaaatgaagcggctgtgcgtccatgcgggcgtggaaccctccaaggtgttccctcacaacctgcgccattgttttgccacggcctactaccgggcctaccgggatatcgcaaaactggcggacgtactggggcatagttccatcgaaacaacccgcatctatctcctaacctccggggcagagcaccagcggcagctcgaccgtctggggctggtgtcataggcggagttaacattccgcacagatagcacaaacgccgggatatacccggcgaaaactgaattaacattccgccccaaacaaaacggtttttctacctgcgggactatatacataaagaaattataccatttctattctcgaaaagcaaggaacttcctaacttccgggcatggaaaagcaagccgcaaaaggagattttttgcggcttggttttgtgcgcctcctgctctccttttattgggagcagggggctttattttttgtgcttggtccttctgctgggcacttgtgcgctaaaactgtggtcagaatgttaattctgacgctgcgaggtgatagatgtgccattggaaaagagccaggaaaggccgagcctttccgagaatacggaacgcctcagcaggccgggactgcgcctgacagacgagctggaactgcgttttctggaaaacctgcgggagcatgggcggacaaaggggacaatcagcacctaccgccgcaacctctccaagctgcggaaatacctgccggaggacagcaatctggaccccgcctttctctccagctggcagtcggaactgttggagcagggctattcccccggcaccgtaaatagctgcacggccacagtcaacggtcttttggagtttgccggacggcgggatctccaggcgggtcagatccctataaacggggaagtgtcttcgccggagctgacccggaatgaatatctccggttgctccaggcggcgaaactcctgaagaaacgccagacttatctgctggtgctgctgtttggcacaatggacctgccgcttcgctccctgtcccgtgtgactgtggaggccgtacaggaaggatgggtgtttgctccacggcggttgcgtgtcccgccctgcctgcgcgcggagctgctggcctatgccggggagcgggggatcgggagcggcccggtgttctgcacccggtacggtaagctgatggaccgtggaaatattaacgtccgcatccaatcgctggcccgcgacgcgcgggtatcggcggaaaaatgtaacccccggtgcctgcgaaaattatgtactgccacgcaagagagcatccgggccaatctggagctgctggccgagcagacgtatgaccgcctgctggaaaaggagtctttgactgcaggttggagcgactgctacaagggaggtgaggagttatgaacggtggaattcctttggcgggggcgtttcaatgcctggccaggcagccgccggaggccggatagaggcattatggagggaattgaagctccataggaaaaacaccgatttttgcagaccgcggctgtgtgccaaatccaggtctgtgcaaggaggaagataccatgaaaaggcgactgttggcaatggtcctttcgctggctatgctgatggggctgctccccacggctgcgctggcggcgggcagcgggggccttctggcggtgccccgtatcaggatctgggccagagagaggaaggggcggtgtctgcggccaagtttaccatctacaaggatggcgtgaaaggcgactcccctaaagaaaatgtgcaggctggtcagttgagcgaaaccgcgcccgatctgaccggggaaaacctttacttcgatcacgccgaggtgaacgggaagcgcgtgtatgaagcgggcactctgacggggcaggatatcacctactacggctccatcagcggggcactgtccattctgggcgagagcgaaaccattgacctttactatgtctccaagtatccggtaacgtatcatgtgaccggcgcggagaagaccgccggggacgatctggtgaagaagggtgactccctgacctttcgggcaatgccgtcggccaagggacaacgactggtcgtaaaggcaggagatactgacatttccaacaccggtacagtctttggccaggacaccggtgaaatgctctttacggtggataacgtacagaacgaactgactattacgatcaccgagacagctgcaacatcatataccttttcatataatacaactgacggcgcattccgcaatggccgcattaccagcggtaacaataatcagagcataacgccgggcggaacgatcacttttagaattgagtcaacagcgggcagcctgttaaatcggtacacattgaatatgctggtcatcaacggccacgaggttcagactcctggcacagagaccggcgagggtgcttatgtagagtctacccttccaagcggcgaaacagtacggataactctggtgcaggaggacactacagcagctccaattcattatcagaatgattatgaggttacgatatccgatgtgtacactgacctctatatcagcgaaggtaattttaagcgcacagacagaaacgaggtcatcatcaaggaactgtccggcataggaaatattgtgggctgggacgatggcgctgaggaatatgttccgggaagcgtaaaccatgtgtatctccagacgggcagaaccggcaacgagttctacttcaatctcaagccaggctatgaaaaaccgcagcttaccgtcaaggtcaacggtcaggtaagcgaagcggagatgaattttgaaaagaatatcggaaatctgcacgacgggagagaaccgagctatacgcaggagcaatatcagtaccgctttgatcttcccaatggcttgggagacaacatagagcttttcctgaccgcgactcccatcacctattcggtggaataccggaatgataggaataacaacgacctgattggcgaaccagagacgggcttcacagtggtggagggcaacaaggataccatcaccatcaccagccggacaccttatgagacggtaaaggggtattcgccggatggctacgttgtaagaggaaccagtgccccagtgtatcacgccggcgatattgtagatgtaaaagatgtagccgccgatgccgctgggaccaccatcatctttgtaccacactgggttcctgtgaatgaagtgaacgagcggaatatcaccatcaacctgtacatcgaagacccgaccgacatcaacggcagtgacattccggcggcgaactacctgcgcacggtggcggagggcgacgccctgttcagaccgaacgaggaacgtggccgggagcatatccgagagtatattagcagctctgatgagccgtggaaagacacttataacgatgaggactttgtgctgcgagagggtggagagatccaagtcgttaaggaatcggttagctccttagatttccactttgatgtgaaaaagggcaacctgacggtgaaattccagtggggtgcgggtgagcagcccgacaccgcggtgcctgctctgccagagaatatcacagagcaaattgccatcaagcaggcattttctgtggatgtgagtgagtccataccggagggctatactgcttctacgacaaccgttgcggggacgatgatcgaagcgggtgtggagaaaaccgtttacctgtacaaggatgcggacaatgacaataagccggacaaccacaccatcaccctgacgtttaatgccggtgaaaacggaatcattgatcctaataatctgacatccggcggagcactgtcagaggatcaaaagaccctgacctacaagctggtaaaaccagtggaaggcgaactggagggcgacaagtatccgcagatcccgcaggtcaacgcaacggcggacagtatggtctggacgggctggttcaacaataaaaatgaatccagccgctacgccgactatgcgaaccaacccgtcggtgcagacgcggcagatctcacctttgatgcgcattacgacgctgccgaaggccataaagaagttgccatccgctattacaccgagcaggagagcggagagtttggcctcgcccgtacccttaccagttaccggaaacccggcgaaactgttacatacggccgccctgcccgtaacggctatgtgacttccaatgaggggacatccggcagcctgaccgtgaccgaggatggaccaaataccgccgatgtctattattatcttgacacggacaacaacgacaagccggatacctacacggtgacgctgaccttccggggcaccggctatggcagttgggatattgaggacaccatgtgggagcagatggaggcaggaaaggattacatctatgacacggactcccgtgctctgaaagtattccttgtaaaagcaaacgaagcaggctttgaggcggagacctatcccgaggcccccaaagtaattcccgaagatacctacctgtttgactcctggcaggatgacagcaagcacgcctatggctccggcacggagggcgacggcatcaccgttggaagttccgtgggggcggaagacgccaacaagagctacacgtcggtctacaacgaggataagaacaacgacgaaaagcccgacgacgagcagtacattacgatcaccttccgggctggggagcacgggacgtttgccgatagcgaaaagacagtgacttatgataagctgctgccgggctacagctcttatccggaggcccctgccgtgacagcaagcacgggctggcagtttgcgggctggagtccggaatacgataagagcggaacaatagaagcgactgtacaggaaagccaaatgtacacggcgacttatcgcgggcaaggcacgctgacctatggcggcaacgcacagagcggcggagaggttttcgacctgccggatgagcagaccgtttgggaaggaaccaccgtggagctaagcggccaaacgccaacccacacccccgtcaacgaaacatccgttgtattcatcggctggtccagaacgaaaaccggccaaatctatggcgaggaggatcaggaagcgtttgagaagatcgcgttgttgcctggcagggtttacatcgacagcacggctttgacgatctacgccgtatggggctatgatactgatggcaaccagaagccggatgtgacggaacccacggaaaagcccaacctgatcaatgtcgtaccgcctgcggcaatcaccgtggaaaacggcaccgccattgaggagatggggcttccaacgcaggtgacgattcagaccacgaagggcgatatgcaggctaatgttacgtgggatactcaaaacacaagctatgatcccagcaaggcagaggcgcagaccttcaccctgaacggcacgctcacgctgccggagggcgtcacgaacacgaacagcattcccttgatgaccaccatcagcatcaccgtgaatgccaaggatgtggaacccggccccgatccttctgcgtcctacaccctgacctacgatgccaacggcggtttcggcgggccggggcaggagaaagtaagcgcggatgaagcggaaaactatcaactgaacaccaccgacaaaccgactcacaagacggctgaagatggcaccatgatcatcttcatcggctggagcgctgagcaggacactaaaatctacggcgcttccgataaggacggcccgaataccattgacaagctcaccctgactgccaacgatgaagtttatgccgtctggggctatgacgccaacgagaacggcgcgcccgacgtggaggaagacggcaagtacaccctggcctatgacggcaatgccatcaacgacggtgatcaagtcgctggcgtccccgacggcggagaaatcaagtatgtttccgggcaggtcgcagttctggacaccgaagaacccacctacaccttggcgccagccacggatgactccgctgtgattcccagccccacagacgagccggagacagagacgctccccagtggagagtccgcaggtgaggaagagcccacagagagcgaacctgccgcaaccgatcctgttgaggaatccatccctaccgaggagagcgccccccccgtagaaaccactcccgcgcatgtgcccgagttagcctccatcggcatgacgcgcctctcctaccgcagtgcgggcgatggcagcggcgacagcgtggtgttcatcggttggtccctcaaccagcacagacagattttcaagggaaccgataccgaagctttcaagtatgtacaaatcgttcccgccgtgaccttcgacgatgaagacatcaccgtgtacgctgtctggggctatgattccgacaacgatggcacagccgacgtgctgggcgagaattatgtgattcgctcctatgccggtcccaacggcagcatcgatccgagcggagacaccaccgttgcagagggcggcgaccaaggctttacctttattcccgactccggctatgcggtggataagatcgtcattgacggtgacacgtatctgaacgacggcaacctcaatctggccggctatgatgcggacagcaagacctacaccttcaccaatgtgcaggccgaccgcagcatcgtcgtgaccttctccgccgatgcggacagcgacggcgttcccgacaagtacgatcccgcgccaagcgagagatacactgtcaccgccagagtaaacgacggtaacggcaccattactcccgtcagcaagaccgttgacgcgggcgatgatgttgtattcaccattaccgcctatggaggttacgcactagactacatcactgtggacggcaaggtggtctactccaacaatgatgcagaaaatccattcaaggatacctggacgctcaagaacgtgcaggcaaacagcgaagttgtggcctactttggcgaggatcagaacggcgacgacgttcccgatgcgccgacctacctgaccgtcacggcgcgggccggtgaaaacggctccatcagccccagcggcaccttgctggtgaagcgaggcgagagtcagagcttcagcatcactgcaagctccgactaccatatctccgatgtggcagtaaacggcgtaagcgtgggcgcggtcagcagctatgagatgataagcatctccgagaacatgaccatcacggccagcttcgcccgcgacagcagcggcggcggaagtcacaccacccgctacaccatcacggccagcgccggtaagggcggagagatcagccctgacggaagcgttcgcgtggtccgtggcagcagcaaaacctttaccattaccccggatgcgggctatgtgatcgaggatgtgctggtggacggcgagagcgtcggcgctgtggataagtacacctttgagaatgtgcgtgaaaagcacaccatcgaggcggtctttgccgagcagaacggcggtgtggcagacccggacgacaccggcgtatctggctggctgaacaccaaggaccacagtgcctatctcggcggttatggcggcgggtggtttgggcctgacgataacatgacccgcgcccaggtggcgcagatgttctataacctcctgctcaataagaatgtgcccatcacggtcagcttctccgacgtggccccggacgcatggtatgccgaggcggtcaataccttgggcagtctgggcatcgtcgccggtatcggcaacgggcaatttgcccccgaccgggcgatcacccgtgcggagttcaccgtgatcgctatgcgctttgcagaactggacaccagtggggagaacatctttacggatgtatccgagaacgactggttctatgactatgtggtaggcgcgatcaagtatggctggatcaccggctactccgatggccgcttcggtccttacgacaccatcacccgcgcccaggtgaccaccatcgtcaaccggatgctggaccgcagtgcggatgaagcctatgtggaccgccacgcagatgaactggaacagttcaccgatgtgccggacactcactgggcttactacgaggtcgcagaggccaccaatgcccacgactacgaccgcaccagcggcagcgaagactggacacagctctggtaagcatactgaacagtacggaggaaagggacttcgttccctttcctccgtatgcataaataaaataaggagttctttaagccgtaatatacttaattgccgcattgccgcctttgcagaaatggaagaaggcggcaatgcatcccacttcaataccgctctgttaaaacacagcatccctctgccggatgggcctgctgaatcattggagaagcacatgacaaatccggaaaccttttgcggtgtgccgtaataccccatttttcttgtaactactcattcgttttatccattgccgagaagtgcactgccggacaattggcattggaacatctttttagattccgtttataatttgctgtcttaacttttggctttaggcccatgaaacacacgggttctattttgtatccccctttctttcacgcaggagaggatgcctgttgacatcccctcttttttacttccctcttcctcctgtctccttggcaggacgcagttctgcactggaggaagaaaactcaagtacgagacctacctcaagcttatcatcgccaccgggatgcggcagggcgactactgcgcgatctgcaagggggtgacatcaactggcaagagcacatctcatcggttcagacagctgtttcatgcgcacactgtagtacaatccttctccaattcatggcgtccccatgacaacgctgtcgccgagccattctccgccacactaaaacaggaagagctttaccggaaggattatacctccgaggcagacttcaaacaatgtcttgcctcctgcatcgagtacatcgagctttacagcacacagcggccgcatcgcacgttgaaaaaccgcataccctgtcgggtggaagaggcattcatgaacagcaagtgaaggggagcggtgtgctgacatatcaggggttcgaatctggccgattacatgttttgtattttgattttgtcctgtttgtattttgcagatgacacaaggcaagaactataggaaattctgacctccttgcagtgcaaaaagttcaggcataaattgcccctacccaatccaaacaatgacatgcatttgttcagatcggataggggcattcacaatggtggaggtgaggggagttgaacccctgtccgaaagcactttaacgggactttctccgggcgcagacggttattgcgggagtctttctccctgttccccttccggatggcaagccgtcacgccgtccggtcaggtgagagtcatcatgcgtgggcggggcaactcttacccgccgcacggacgccacatcaacgacgccttccccggcctgtggccactccggttcagacggccgcctttaattaggcagcaatagcaacttgtctgttgttatttgatttataaattgcccgttttatggcggtcaggcgccgccgcccgctggtcccgcctccatacccccgtcgaaaccggtacacccccctgtcgtcgggacagactgtgctctacccgctcccggctgcaccgagagctcgcaatgctccgttgtccctccacttcccatcacaaacgcttcactggtttgtgatgggagcctgcgattcgcatctccatgccgagggcctttctgggatatctggcaggataccaatggagattgtaacacatcccgctgtcggaatgtgttacaattccatgacatttcaggttttggtaaattttaccatcagcttcaccggcgcgactttggccagcaaccggtagaatttgtagaacagccgcggcgtgtacatagtcctgcccgccttggcggcccgcagcgcgcccgccgctacccgcacctggtcgcagtaaggcaggtactcaaaggccggggaacggccagtgatgctgcccacgtccaggaactccgttttcatggggccggggcacaccgccgtaacggtaatgtcccttcgcttcagctcttcactgaggcccacagtgaaggaggacacatacgccttgctagcgccgtacaccgtcatccggggcgtggggcagaaggatgcgatggaagacgtgttgaggatgcgtcccccgccggcatatagggaatgaccaggttcgtcatcgccgtcatggccctgacgttcagatctaccatccgggtctggacagcggtctccgtctcccccatccggcccaggtaaccgcagccggcgttgttgatgaggatcgccacctccggtttctccgccgccagtttttcctgcagggtggtaaaggacatggaatcgcacaggtccaagggaaggcagaccgtctccacccccaccatctcccgggcgatctcctccagccggtcctcccggcgggcaatgagccagcagcactcaatctccgggaatatgtccgtcagctggcgggcaaactcccgtcccagaccggaggacgcgccggtgatgatggccgtcttcattgggctctccccctctcagcgcttttcaggctccggatagtccacgccctgggtgtccacccgaatgctctgaatgaccaccggtgtcttgggcttgtcgttccagtcggtggggacctccgagatgcggatggcctcctccacgtttccggtcacctggccgaaggcggcgtactgcccgtccaaatggggcgccggggccaccatgatgaagaactggctgccggcggagtccggatgcatggcccgggccatggacagcacgccggtggtgtgcttcaggtcgttctggacaaagccgttgccggagaactcgccccggatgtcatagccggggccgcccatgccgttgccgtcggggcagccgccctggatcatgaagccggggatgacccggtggaagatcaggccgtcataaaagcccttgttggccagggagatgaagttggccaccgtgttgggagccttggcggggtatagctcgccggtcatcacagcgccgttttccatggtgatggtgacaatagggttcgtcatgtcagacatatcatcgattcctttcttttagggtgcggtcaatctcccgcttggcgtcccgctgggaggcagccgcccgcttgtcatagttcttcttgccccggcacaggccgatctccagcttcacccgggaatccttaaaatagacggacaggggcaccagggcatagccgtcctgcttcaccagggcatggagcttgcggatctctcgtttgtgcatcagcagccgccgggagcgcaccgggtcccggttgaagatgttgcccttctcatagggggagatgtgcatcccatggacgaacagctccccatcctttaccgtacagtaggcgtccttcaaattcagcgttccggcccggatggacttgacctccgtgcccgcaagctcgatgcccgcctcgtaccggtcctccacgaagtagtcgtggaaggccttgcggttctgggccgcgatcttgattcccttcttctccgtggggctcacctctttcctggaaggttttattataataccatattttccccgcatcttcaagagaaagtcacagttggctttttctggaggatatgctataataaagtgattgagtatgtcctgaatatacaaaaaatagacacaaggtggaatgctatatgaatcagactgcggatctgacggagaagaccctcagccgggaggaaaagtaccagggaagcttcctgagcctgcacgtggaccaggtgcagctgccgaacggcaggacctctttccgcgaggtagtagagcatgtggacggcgtggccattctggccctggacgaccggaacaatgtgctcaccgtcacccagtaccgctatgtgatcggaaagacgctgctggagatccccgccggaaagctggagccgggcgaggacccggtggccggtgccctgcgggagctgaaggaggagaccggtgccgtgccggacaccttcctgcccatgggcgtgaccctgccctcccccggctgtctcagtgagcggctgtacctcttcctggcaaagggcctgcacatggagtcccagcagttggacgaggatgaattcttgaatgtggagcgcattcccttcaatgagatggtccaccgcgtcatggacggggagatcgaggacagcaagaccatcgccgccgtgctgaaggcaaaagtgcttctgaatctttgagaggagactctgccatgagcgatccgaaaaccgtcctgatcgtggaggacgagaagaatatcgtggacatcctgcggttcaatctccagcgggcgggctatcagacgctggaggcctatgacggagaggacggcctggctcaggcggtatccgccaatccggacctgatcctgctggatgtaatgctgcccaagaaaaacggctttgacgtgtgccgcgccctgcgggatcagggcagcagcgttcccgtcatcatcctcaccgcccgggaggaggaggcggacaaggtcctggggctggagatcggtgccgacgactatatcaccaagcccttctctatgcgggagctggtggcccgggtaggagccaacatccggcggaccaccatgacgccgccggctgccgcctctgccgcggcctccgccatgcccgtgtccggggatttgtctatcaataccgacagccaccaggtcttccgggccggtaaggccatcgacctgacccagcgggagtatgagctgctgacctttctggccagccatcccaacaaggtctactcccgcatcgacctgatggagcaggtgtggaactacggctatgtgggcgacgacgtgcggaccgtggacgtgacggtccggcgcctgcgggagaagatcgaggccgaccccgccaatcctgtcttcatcctcacccgccggggcgccggctactacttctccgtgaaatgactccgccccccattctctaaggaaagaaggtgttcgccgtgttccgcagcctgcacatgaagctgatgctgattctgctgctgctcatcacctcgctgatggcggtggtaggtgcattcctgaccaccagcgtctccagcttctatatcgacaccttttacgagcagatcagcgccgtgttcagcgacgacagcgacggctatgtctccaccctccgggcccgggcggccgaaccggacggcgccgccggcatcaaggagatgctggagggccgggccggctccctgggcatcgactaccgcacccggaactacttcatcctggatgggcagagcggcacctacctggacgggtctgcagaggcgtcagagctcccccgggagcagaccgccaacctgctgaccgcccggaatgccgtggctcagggcgacagcaccctggtgggagaccgcagcgacatcaccgccgactatatggacgcagccatccccatcatggggggcggaaacgcctacatcatttacatcctggacaacaaggacacagtgacggacctgaactcccagctcttcctcatcatcatgcaggcgctggtgatcggcctgctgatctctgtcctgttgagcttcctgctgtccaagaccatggtgggccccatcgaaaagctcaccgccggggcagagcgggtggccgcgggagactttgacagccagctccccgtggagtccactgacgagatcggcatcctcacgggcaccttcaacgagatggccgatgtccttcaagccacgctggccgccgtggagaacgagcggaacaagctggacaccctgttcctccacatgaccgacggcgtggtggcctttgaccacgacagcctccttatccactgcaatcccgccgccaccaatatgctccatcgcagtgtgccggagggcactacctacgataccctcttcggtcaggtctatcccttccaggagaccctggccctccaaagacccaactacgccgaggcggagatggaggtgggggaccggacgctggagctgtttctggcgccgttttccgaccaggccagcggcggcgtgctggtggtgcttcatgacgtgacggagcagcaccgcaacgaggagcggcgcaaggagttcgtggccaatgtctcccacgagctgcgcacccccctcaccaacgtccgcagctatgccgagaccctgcgggacgcggagggagacatccctgtggagacctccaacagctttctggacatcatcatcacggagacggaccgcatgacccacattgttcaggatctgctgaccctcagccgcctggatgcgggcaatgcggagctggtgctctcccgctttcctttcggggacgccattgagagcgtcacccgtgccaatgccctggccgccaagcagcacgggcacacgctgacctatactccgccggagagcctgcccttgatcgtgggggaccggagccggctggagcaggtgatgatgaacgtcatcggcaatgccgtcaaatatacgcccgacggcggacacatcaccatcaccgccggctccacagaggcggaggtctggatggaggtctgcgatgacggcatcggcatcccagagaaggatcgggaccggatcttcgaccgcttttatcgggtggacaaggcccgttcccgggagtccggcggcacgggcctgggtctctccatcgccagggagatcgtccagcgccaccacggcaccatcgccctggcgccccacgagggccccggcaccaccatccggctgacgctgcccatcggcgggccctccaaccccatctgagaaagtcacatccgcaaaaccgctgaaaggaggctgcccatggatcaaacggcccggcgcaggcgccgcaacctcatccagaacatcgccatcgcgcttctgtccgtctcggcggtgctcctgttcgcccagctgcagctgtacaatctgggcacgtcggaggacccgctctatctggagcggctgaccggcgagggctcaccctcccggctgcgggagtttcccgctccggtacgggtggtcctcacggactcctacggccggtatggcagcctgggcttcactaccaacagtgacggcttctccgccctgggcctgcgggaggctctgggctccgtccagcaccttgctccttctgcaacggatgcctttcggggtgccctctcgggcccttccatctattttgattttttgaatcccctgcccctccaggtgcttgccgagctcaccggtgcagagggcaccgcgttggagggaaatgcccgctgtctgctgctggccgcaggggcggacggctccgtccatctctatgtatgggacggtgctgataccgtcctcaccggcaccgtcgcctccaccgccctctccatagattctcttacagaggcagtgagccagtccggcatgggaagcgtctccttcgcctttgaggttgtggagatggagccgctatacggcaagctgtttcccctctccatcctgccgacggagttaccgcagctgccggtcctctctgccgcttcatccatctccggcacggactggctgctggcggctttcggcttcaacatcaacacgcgggagcgctatgcggaggccgacggcacggaggtcatcaccgaggtcgaagccgatcgctcccttcacatccgtccctccggggagatcacctaccgcagcggaacagatgctacgctggagatctccgcacaggaggaggtccccactgcggcggaagccgtgctgggtgccagtatcctgctggaacagctgacagaggaccgctccggcgaggcaaggctgtatctggagtccgtcagtcagggcggagacaccacccagcttctgttcggatatcagatcgatggtgtccccattcgcttctccgacggcggacacgccgccgagatcacgctctccggcaccagcgtcacccgcctcaccctgcggttccggcagtacagcaccgccggggagacgtcgctcctgctgccgctgcggcagacgctggccattgcagcggagcatcccggcacagagctgtctgtgggctatgccgacggcggcggagactcggtatccgccagctggctggcggactgagtgcagcggatacaagccgctccggcggtggaaaggaggtccgacggatggagagcttccgtctgaaaaacatcatcattctgatcctggctctgatgaatctctgcctcctgggcctgctgggagtacggctgaccaccggctattccgcccaggcagaggcccgtcagcagatggtgcagctgttcgcggcggagggtgtctctctggatgacggcattatccccggcgccacaccgcccgccggcctgaccttgtccagggacccggacgaggatgagaagctggccggctttctcctgggagatgagctggtcatgtctgatggtggcggcggcgtcaccacctatcaaagcgaaaacggcagcgccgtcttccggtccgacggcacctttgacgtggtgatcgaacagagcggcgagacagcggacgccctgtgccgggccttctgccgtgcgttccactacgaagccctcgccttctccctggatggggaggacggcagcgcctccgcggtccagacctacgacggggccccggtggtcaactgcaccgtctccttctccatctccggcgggcgggtggcctccgtcagcggtacccacctgccccaggcgggacagaccgccaatgggaacggtgccctgtccgctctggatgccctcaatgccttcctcggcaccgttcagagcggcgcggtggtcactgccgtgacggacctgtacctctgttatgagctgcagagcaccacagccactcctatggccctggtgcccgcctggtgcgtttctacggatacggctgattattatgtcaactgctacaccggcgcggtctcctccggctgagtaactggagccctgccgggcagataatttgtttccaaatttctccgcctgtgcgccgcgattcggcctgaagcggctgttttcagccgtcggcggctttggaattttgacgaattttgacgcggaacccgtccggctcgcaggaagggtttgcattttgcgcggggatatggtatagtttgggtgtgtgagcttccccatccggaaaatttctccggtttcgcaggtctttagcgggtatgaagcggcacgggccgggcacactgtttcatagaaattacaggtgccgccacaaaagaaagcgccttttgaagagagggtatcgactttgacaaagtatattgtacagggtggtcatcccctgtttggtgaagtagagatcagcggcgccaaaaacgccgccgttgccatcattcccgccgctctgctggtggacggggtctgccggatcgaaaatatcccccagatctccgatgtgacgctgtccctgaagattctggagcatttgggtgccggcatccgcgtcatcaaccgccatacagtggagatcgacgccagccgcatccgctccacccgaacctcctatgagttggcccggaagatgcgggcctcctattatctgattggttctctcctgggccgcttcggccaggcggaggtcgccatgcccggcggctgcaacttcggggtgcgccccatcgaccagcacgtgaagggctttaccgcgcttggcgccaaggtcatggtggagggcggcttcatcaacgcttccacggagaccggccgcctcaagggcgccaacatctatttggatgtggtctccgtgggcgctaccatgaatatcatgatggccgccgtccgggcggaaggcaacaccgtcatcgagaacgctgccaaggagcctcatatcgtggacctggccaacttcctcaactcgatgggcgccaacatccggggtgccggcacggacaccattaaaattcagggcgtggaccgcctgcggggcggcagctacgccatcattcccgaccagattgaggcaggcacctatatggccgccgtggctgccaccggcggccagatcctggtgaagaatatcatccccaagcacatggattgcatcaccgccaagctggtggagatgggcgtggaggtagaggagcgggaggacacccttctggtccgccgcagcggccccttgcagaaggccaatgtgaaaaccatgccctatccgggcttccccacagatatgcagccccagatcaccaccgtcctctgcctggcggagggcacttccctggtgacggagagcgtctggaacaaccgctaccgctatgtggatgagctcaagcgcatgggcgccagcatccaggtagacgacaagaccgctgtggtggagggtgtggaccatctcaccggtgcgcccatccaggcctgcgatctgcgggccggcgcggcattggtgatcgctgccctggctgccaagggcgagagcgagatcagctgcgtacagtatatcgagcggggctatgaggatatcgtcaccaagctccagggccttggcgcttccatccgtaccgtggaggtccccggtgagtccgaggagctggaggctcacattggctgaaacggggtacaggcttctctaggtttcccccgctgccgcggggttatacaatcaagacatttccatagatcgagcgattttacgtccgcgatggaggatggcgactttcgtcgacggcctcccttgtggacgtcttacttttcaccggaagaggtatgttttttgaccaccgtacatacgctggcaagcggttcctccgggaacgcgctgctgctctcctgcggggagagctatattctgctggatgcgggcatttcctgccgccgcatcactgccgctttgcgggagctgggcctggagctcggaagcctcacggccattctcatcacgcacacccacgcggaccacatctccggcctgcagacgctgctcaagcgctgcgccgccccggtttttaccaccgagcgggccgcccgggagctatcctggcggctgcccggcgcagagacacggctggacgcgctggacttcggcatcccccagtctatcggagagtttgccgtgacggcatttcccacatcccatgacgctcccggttcctgtggtttccggctggacgccgccggcggcgccgtcggtgtcctgacggataccggctacgtcaccgacgaggctgccgacattctggagggcgtggatctggcggtgctggaggccaaccacgacatcgagaccctccgcagcgggccctacccctactatttgaaacagcggattctgggcgcacaaggccatctcagcaatgaggatgccgcccgttttgccgccgttctggcgcagagcggcacatcagagatcatcctggcccatctgagccgggagaataatacgcccgccatggcgcaaactgccgtagaacgggctctctccgccgcaggtgtctcgcctctgctgtctgtggctcccagggactgcctgggcccagcccacaccgtgagcaggaggtccgtatgcagaaggtgacgatcctgtgtgtcggaaagctgaaggagaaattttatatagacgccgcggcggagtacgtcaagcggctgtcccgcttctgtaagctggagctggtagaactgccggaggagcggctgccggaggacccctcccccgcccagatcgaggcggcccttttgaaggaggctgctgccatccgggccaagctcccatccggcgccgccctgatcgctctgtgcgtggagggagagccgcggtccagcgaggcgctggcccggcagatggctgcctgggccagccagggcgtgggacatctggtgtttctcatcggcgggtcctttggcctgcacccctccatcaaagcagaggccaggctgcggctctccatgtctcccatgaccttcccccaccatctggcccgggtgatggtgctggaacagatctaccgggcgtatcagatcaacgcaggcaccaaatatcacaagtaaaggacgtggaactatgacagaaccggcaaaggacttctgggcccgggcggaccgggacctgctggaccgctggccgaaagacgaggcaggcgcaccggaacccgccgccaagctggacatccagtgggagctagacagccaggcggacatcactgtgtcgtttttggaaagctgcggcatccccgccttccagaatgggtccctgggcaaggtgctgggaggcttcgcctcccagggagtagagatttgggtccccgcctcccaactggaggaggcccaggcgctgctgaacacccccgcggaaatcccggagcaggactaatgtcccgcctccgttctcaatttacacaacaggaggtatctctcgcatggattttatgaaggaatatgaaaagtggctggcgagtcctgccctgtccgacgcggagcgtgcggagctggagagcatccgaaatgaccccaaggagattgagagccggttctacggcccgctggagttcggcaccgccggcctgcggggcatcatggccgtgggcctgcacaacatgaacatccatgtgatccgctgggccacccagggctttgcccaggtcatctgcgccgagggcgaggagggcaagcgccggggcgtggccatctgtatggactgccggaaccactccatggagttcgcccgggcggcggcggaggtctgcgccgccaacggtatccatgtgcggatcttcgagtccctccgccccacgccggagctgagcttcgccgtgcgggagtaccgctgccaggcgggcatcaatgtcaccgccagccacaatccgaaggagtacaatggctacaaggtctactgggaggacggcgcccagctgccccctcaccacgccgacgccatcgccgctgctctggaacagatcgacgtcttcaatggcatccggcgcatggacttcgacgaggcggtgaaggccggcctcattgagactatgggggaggagacggaccggaagtttatggccaacgtcactgccatgattaacgacaaggaaaccgtggccaaggtggcggacaccttcaagctggtgtacactcccttccacggctgcggctacaagctggtgccggaggcattgcggaccctgggcatcaagcacctgatctgtgagcccaagcagatggtgatcgacggcgacttccccaccgtggtctcccccaacccggagaacccggagggcttctatctggccatcgacctggcccgggagaatgacgtggacttcatcctgggcactgacccggacagcgaccgggtgggcatcatgatccggaaccacagcggcgagtaccgccccgtcaccggaaatcagaccggcgtgttgctgctggactacctcatcggcgccatgcgccgctccggcaaaatgccggagaagcccgtggccctcaagaccatcgtcaccacggagatggcccggaaggtggctgagtccaacggcgtcacctgctacgacaccttcactggcttcaagttcatggcggagaagaagaacgccctggaggccgccggcgaaggaaaggtcatcttctcctatgaggagagctacggctacatgctgggcgactacgtccgggacaaggacgccgtcaccgcctccatgctgctgacggagatggccgcctggtacgccgcccagggcatgacgctgttcgacgccctggagaagctatacgagaagtatggtcactacgccgaaaagacctacaacctggtgatgcccggcctggacggtctgaaggatatggcgcagctgatgaagaatctccgggagaatcccccggcggagatctccggcgtgaaagtcgtcacccggaaggactacaccgacgggtccgtggtggactgcgccaccggtgcgaagagcgccatggagctctccggctccaacgtgctgcggttcgagctggcggacggcaccaccattctggtgcgaccctccggcacggagcccaagatcaaggtgtatattctgacccagggcgcggattctgccgcctgtgacgccaatctggagaagtacggccagtgggtcaagacgctgcaaaaataagacgtcccttcttagtatccaaacaacggcgcccgttcctttcggaacgggcgccgctttttgggttttcagaaccaggccgcctgctgctcccggaaccggggctccgggccgtgggcgtaggggtcgtaacggcccaggttgcagccgaactcctggagacgggcgatctgccccgttgccgtccagcggaccagggtcataccctcgaacacctcccggcggccgtcgtccatccggttggcgaaggtccactccaccaccgtctggtcccccttgtggaagaactggcggatatcccaccgctccaccgtgccccggcgattccactcggtgaaccaccaggcgatcttgtccgcgccgtggtactccgggccccagctctcgatgtacaccgcgtccggggcgaaaaggtcccggatgccggtgtcccgcttggtgagccacatgtcgaaccattggcagatggccgcttcccgctgttccatctgattgctcctttccgctgtatctgctcttatctataagcaaaatgaattaggatgcgaggatgttctgaacctccgccagcagggtctccccgtcgtgcaggggatagccgtccaccgcaaagcgcccctgactgcccaccaggatgacggattccccattggcacccaggagcatgacggtatccgcttccagaggatataccccaacgggattcttccagcggaacctagaggccccccgcattgtagcctccaggtccgccagctgctccggccggagcgacgccgtcaaatcccgtccgtcctgccggacctccagcagctggaagtcctctccccctgccggggcgggtagcaggaagaaatagccagccagggctgccacggccacaacacataccagcagaactttccatgttcttttcatatgcgccccttctttgtcactgctccggcaacagggcccaaagctgttccaggagttcttcgccattgatgaggggataccgtctgtcaccatcataaattacggcggtgtcctcgtccagatagatatgccatagcccctcactgtctctcccgttgatctccacactgctctccgagagccatggagagcagccaacacggtaccccctctttccgcgcccagcaccagtcccttgatggcgtctaaagtatcctgatcgatctgttccgtgatgtcctctagtgtctcccctgctctgatgaagctgatttcaaagtcccctcccaccgcagggtagtgcaggacataccgtgcgcagattcccacagtcatggccgccaccgctgccactaccacaacgcacgccagcaaaattttccattttcttttcacaggcgcatccctcccctgtcacggctccggcagcagggcccagacctgtttcagcagcccttcgccgtcaataatggggtagccgcccctttgtccgtcgcagagtacgcaagcttcgccgtccagctcaaagaaccagggtccatggctgtcgacgcctatgatctgcaccgtgtcctcccgcagctgccttggaaagacgtttctgcggtacccccttctctctgcttgccgaagcaggtcattgagggcgttacaggtattctggtctatctgaccggtaatattctccagcgtctctcccacattgatatactggacttcgtagtcctcccctaccgcggggcggggaaggagataccacgccgcagcacatgctgccgtcactgccacgacgcacgccagcaggattttccacttctttttcaagagaaccgccccctctctggctccatcataaagggaccgccctgggcctgtcaaggcggaacgcagatttttccaacgttattcttgacatatgttcaaaatcatatataatgggcatatgttcaaaacaagggaggaacacccatgccgcgcagcgccaaatgccgccgggtctgccagatgccggcccactgccgctttgctccggaacagcccgcccacggggaggccgtggagctgacagtggaggagtatgaggcggtgcgtctgatggattacctgggcctgaaccaggaggaggcctccgcccagatgggggtggcccggactaccgttcagcggatctatgcccaggcccgacagaagctggcggtctttctggtggaaggccgtccgctgcagatcggcggcggcagctacgccctctgtccccaggaaagttgccggggcttcagcaggccctgcggccggtgtgcctcccaagacggaaaggaagcgtcctcatgaaaatcgcagtcacctatgaaaacggccaggtgttccagcactttggccacacggcacagttcaagctctatgatgtggagaacggcaccgtagcctcctcccaggtggtggataccaatggcagcggacacggggccctggctggctttttgaaggaccatcaggtggatgccctgatctgcggcggcatcggcggtggggcccagatggcgttggcggaggcaggtatccggctgtacgccggctgccagggcgacgcggacacccgggtggcagaactgctggcaggcacgctggtcagcgccgatgcagccacctgcgaccatcaccacggtgaggagcacacctgcggcgaccacggctgcggccaccacgagagcggccatacctgcggccactgctgagaccggaccgggagggcgaaacgccctcccggtttttgtgcagcaccttttggaaatatgggattccctttctgcataggatgggaacagcggactttgacacttcgccggaaaggatgatccccttggagcaatacatggaacagcattatcccttcaccctgccgcccctgccctacggctatgacgcgctggcgccggagctgatcgaaaaagtgctgtatttccatcacgacaagcacttcgccgcctatgtggacgctctgaaccagctgctggagcggacgcccgcctatcagtcctggccgctttggaagctgtgcctaaactgggaggaactgccggatggcctgcgacagggcgttcggaacaacgccggaggcgtctttaatcatgacctgtatttccgcaccctccaccccctgccggtctccgccccggacatggcgctggagggcgctgtggtacgggacttcggcggcatggcaggtttgaaggaggccatgcgcaaggcggccctggggcaattcggctccggctgggcctggctatccgcagacggcgaggggcacctggctgtccaaaagaccgcaaaccaggacacaccgctgcccctgatccccttgctgtgttgcgacgtatgggagcacgcctactatctccaataccagaatcgccgggcggactacttcgaagcctggtggcgactggtggactggcctgaggtctcccggctctataccggctgcctggcctgccgtccgccccggccctgatggaagattccagaggcggcggcaatcgccgccgcttttggaaaactccagaaaataggcgttgacaactgcttccttttccgttatgataatatgtcgaatgaagacgcagaggaaggagcgtacccatgaatttcttgctgaccggcggggctgttttccgggatggaactttccagaatgtggatgttgccatttccaaaggccgtattgtttccgtttctccctccctttcccaggaaggtttttccgtaattgaatgtcaggatcaagtcattgttccaggtttcgttgatgtacatgttcatcttcgggagcctggattttcttataaggaaaccatcgcctccggcacggcggcggccgccgcaggaggctacacggcggtgtgcgccatgcccaacctgaatccggtgccggactccctggagcacctgtggccggagctggacgccatcgcccgggacggccgggtgcgggtgtatccctatggggccatcacccggggcgaaaaaggcgcggagctggcggacatgccggctatggagccctttgtctgcggcttctccgacgacgggaaaggcgtccagtccgccgaccagatgcgcgatgccatggaactcgcaaaacagctggacaagcccatcactgcccactgtgaggacgagtccctgctgactcccggctggtgcatccacgacggggagtgggcgaagcggaacggcttccccggcaacgcccctgagagcgagtggaaacaggtggagcgggatctggagctggtgcgggagaccggctgccggtaccacgtgtgccatgtctccaccaaggagagcgtggccctcatccgcaaggccaaggcggaggggctgccggtatcctgcgagaccgggccccactacctgatcctctgcgacgaggacctgatggatgacggccggttcaagatgaatccccccatccgctccgccgcggaccgggatgctttgatcgaagggctgctggacggcaccatcgactgcatcgccacggaccacgccccccacagcgcggaggagaagtctaggggactccgcagcctcaacggcatcgtggggttggagtgtgccttcccggtgctgtatacggagctggtggagccgggcatcgtccccttcgccacgctgctgaacgccctgtgcgtcaatccccggcggctgttccgcctgcccggcggaaagatcgaggcgggagagatcgcggatctgaccgtgctggatctgaaccggccccatgccatcaacagcggtgccttcttctcccggggccgctccacgccctttgacggctggaccgtcaccgccggagtggacaagaccatctgcaacgggaatctggtgtacaccgccagctcccgcaacatcaataagacccccattcccccctgtcaggaggactacctatgaaacaatccctctttaccatggaacacgcccggcagctgaccgccgacacctatgagctggtgctgtccggcgacacctccgccatcacggcgccggggcagttcgtgaacatccagttgcccggcaaattcctccggcggcctatctccatctgcaactggacgaaggacgccctgctgctcctggtccgggtggtgggcgaaggcacccatgacttagtgcggtgcgtccccggcacagagctggatgtgctgtcgggtctcggcaacggctttgatctggcaaagggcggggcccaccccatcctgctgggcggcggcatcggcatcgcgcccctgtacggcctggcccagcggatgctggaggcgggcatcgcccccacagtgggactgggattccgctccggcggagacgccttttacctggaggaattcggcaagctgggctgccgcctgatggtggccacggaggacggcagcttgggcacaaagggatttgttacggatctggcccgtcacgtgccggagtgcggctacgccttcgtctgcggccccacccccatgctgaaggccgtccacggcctgccccagctcaccggcgggcagttcagcttcgaggcccggatgggctgcggcttcggcgcctgcatgggctgctccgtgcccacgggaaacggctacaagcgggtgtgcaaggacggtcccattctgtacaaggaggaaatcgtatggtaagcctgtctgtccgccttgcaggggtggagctgaaaaatcccgtaatccccgcctccggcaccttcggctatggccgggagtacgcagagctgtatgacctggacctcctgggcagcttctcctggaagggcactaccgcacagagccgtccgggcaaccctcagccccggatcgcggagaccgcctccgggatgctgaacgccgtgggcctccagaaccccggcatcgacgcggtgatcgcggaggaggtgcccaacattgcaaagatctttcatgggccggtgatcgccaacgtgggggcttctctcttcaggagtacgctgagaactgcgccaagctcaacgacgtggagcaggtgtccattctggaagtgaacatctcctgtcccaacgtccacgccggcggcaggaactttggctccgatccaaaagctgcggcggaggtgactagggccgtgaaggctgtcacccggaagccggtcttcatgaagctctcccccaacgtcacggacatcgcggagatcgcaagggcctgcgctgacgcgggagccgacggcatctgcctcatcaacaccctgttggggatgcggatcgacctgaaaacgaaaaagcccctcatcgccaaccgcaccggcggactgtccggccccgcggtgttcccggtggcggtgcggatggtgtgggacgtgtacgaggcggtgcagctgcccatcatcggctgcggcggcgtctcctctgcggaggacgtgtgtgagatgatgctggcgggggccagcgccgtggagatcggcgccgccaacctgcgggacccctatgcctgcaagaagatcatcgaagccctgccgggcgtgtgcgaaaggctgggcgtggagcgtatcgcggacctgaccggcgcggcgcacggctgaacgctgtcaccgagaaatttacagaaaggactgtttgaatatgagcgcaaaagacgtcatcatcgccctggacttccccacccgtgaggagaccctctccttcctggaccagttccccgccggggagaagccctttgtgaagatcggcatggagctgttctatgccgagggcccccaggtggtccgggacatcaaggcccggggccacaagatcttcctggacctgaagctccacgacatccccaacaccgtgaagcgggccatggcggtcctctcccgactggatgtggatatggtgaacctccacgccgccgggacctctgagatgatgcgggccgccctggagggcctgactcgtcccgacggcacccgccccctgctgattgccgtcacccagctgacctccaccgacgccgccgccttgaaaaacgagctgctgatcgacacccccatggcagagacggtgctctcctacgccaagaacgccgccgccagcggcctggacggcgtggtctgctctcctctggaggcggctctggtcaaggagcgttgcggcgcggacttcctgaccgtcacccccggcatccggttcgcggacagtgccgccggcgaccagaagcggatcatgaccccggagaaggcgggcaagtccggctgcgactacatcgtggtgggccgtcccatcacccaggcggaggacccggtggccgcttatcggagagcggtcaaggacttttggggctgagcggaacgggggcacgtctgcatgaaatttgatttgatggaacttgcccttgtcattgctgtctttttcatggtactggcattcggagtaatctggatcaaagccctgccattcggttataccgagtcggcgctattgtaccttgcagccattgtggccgcaagtgctttctgggtcggccgaaagcactgaccatcttcgcacatttggataaggaggatttttccatgaacttagaacgtgaaatcgcccacgatctgctgagcatcggcgcggtgttcctgcggccggacgagcccttcacctgggccagcggcatcaagagccccatctactgcgacaaccgcctgaccctcaccgctcccgccgtccgcacggccgtggagaagggcttggtggagctgatccgcacccattacccggatgcggaggtgctgatgggcacgtccaccgccggcatcgctcacgcggccatcgtgggccacctgatggacctgcccatgggctacgtccgctccggcaacaaggaccacggccgccagaaccgcatcgagggcaggctggagaagggccagaaggtcgttgtggtggaggacctgatctccaccgccggcagctgcattgaagttgtagaggcgctgcgggaggcgggtgccgaggttctcggcgtcgcatccatcttcacttacgggctccaaaagggcctggaccggctggccgccgcgaacgtcgtcaaccactccctctccaacttcgatgccgtctgcgaggtggccgctgaggaggggaagatcaagccggaggacattgagcggctgaagaggttccgggccaacccatccgacgaatcctggatcacgtcgaaataaattccgctcattccgcttccggctttgccgggagctattccctgccgcccgaggagcggctccctcccaccacacccctgaaaggagttcatcatgcccagaaatctcatcgacatcaccgacctctccgtggaggagatcaatcagctgatcgccactgcggaggacattatcgccaacccggtcaagtaccaggacgcctgtgcccacaagcagctggcaacgctcttcttcgagccctccacccggacccggctctcctttgagtccgccatgctggccctgggcggcagcaccctgggcttttctgaggccagctccagctccaccgccaagggcgagaccgtgggcgacaccatccacaccgtcagctgctacgccgacatcatcgccatgcgccatcccaaggagggtgctccctacgccgcctcccagttcagtgaggtacctatcatcaatgctggcgacggcggccacaaccatcccacccagacgctcaccgacctgctgaccatccaccgggagaaggggcggctgaacaacttcaccatcggcttctgcggcgacctgaaattcggccgcaccgtccactccctggtgaacgccctgagccggtacgatcacatcaacttcgtgctgatctcccccaccgagctgaagctgccccggtatgtgaaggaggaggctctgaagaagaagggcatcccctacacccagaccacggatctggagtccgtcatcccccagctggacattctctacatgacccgtgtccagaaggagcggttcttcaatgaggaggactacctgcgcttgaaggacagctacatcctgacaccggagaagctggagaacgccaaggcggacctgtccatcctccaccccctgccccgtgtcaacgagatcactgtggcggtggacaaggatccccgggccgcctactggagacaggtgaagaacggcaagtacatccgcatggcactgatcctgaagctgctgggcattcaggtgtgagaaggaggcattgacgctatgaacatcgacagcatccaaaacggcgtggtcctggaccacatccaggctggcaagagcatggacatctaccgctacctccatctggaccagctggactgctccgtggccatcatcaagaatgtccgcagcggccggatgggtaagaaggacatcatcaagatcgactcccctatggaggtagatctggatgtgctgggctatatcgaccccaacatcaccgtcaacatcatccgcaacggcgtgcgggtggaaaagaagcatctggagcttccgaaaaagctggtgaatgtcatccactgcaaaaacccccgctgcatcaccgtagcagagccccagctggacgccatattcctgctgagcgatcccgccactcacacctatcgctgcgcctactgtgagaccgcaaaggacaagaagttctgattccccgtgacggcactgcccgttcagactgcgtggacatccagttttttcccctccggcagggccgtatatacggattctgcattgcaggaaagttttcctgcaatgcagaattttttttgcaatttctgttgcgttttggaggaaaatggcgtatactgcggcccggatttcagaaaacggaggcactcctatgaagcatcatccctcttggaccgctctgcgcagctacgcgatcacagccggtctggcctgtctgatgggcgtcagctatgagctgtttgtctttcccaacgcctttgccccggcgggcatcaacggcctggccaccatgctgcaatacctgctgcacgtcaatatcggctacctctccctgctcatcaacctgccgctggtcctgctggcctggaaaaaagtcgaccgggacttcgcccgcaaaacgctggtgttcgtgctggtgttctccgccgtcacgctggtgctgggccagatggacctaagcgccatcgcctatgactccggctcctccgccatcctggggcctgtggcggccggtgtggtcagcggcgctgtgtacggctgggtgatccggcagaacggctccaccggcggaacggacatcgtagccgcctgggtgcggaaaaagcacccggaggccagcctggtctggctgatcttcagcctcaatgccgcggtggcggtgttgtccttcttcgtctacggctgccagttcgagccggtgatcctgtgcctgatctactgctatctcagctccagcatcagcgacaccattttgaagggcggcaaatccgccatgaaattcgaggtggtcacccggcagccggaggagctctcccggcagctcatgcagcagctgcgccacggtgtcactgtgctccaggcggagggaatgtactcggagactccccgttccctgctgatctgcgtggtgaaccgccatcaggtggttcggttccaggagattctggcccgcttcccggataccttcgcctgcgtctccagtgtcaatgagacctgggggaatttcaaacacgtggcatagaaaaaccggcggaggccgtacagcctccgccgatttttcaggtttttactccgccgcccgctccagccggtccaaggggaacggcggtgcggccagaggcttcaccgccaagctcatcagcagcatggggttatcatccgccgccacccggttggaatggagcacgccgcagatcttgcagcggtggatgatggcccactcgccgcccttgcggacccagacggccaccggctccatggtgccgccgcagtcggcggcccggtcccccggctcgtcatccaggtggacgctggcaaggcagttggggcagtggttgcggtgctgggttccggcagcctgaggtcctaccggccagccgcagacccggcaggtgaatacatcccggcagggatcctgccggtagtccaggcggcgccgtttcggtttttgcgggattcgctgggacattggaaattcctccttggtgttgtcttactgccctcagcataccctgccgcaggccggtcccgcaaccgtcaactcggttcagaaataagaaggcgccatgcgggagtccgcatggcgcttgtgttcttattcatttctcaggcgggcgatgatcttccaaatgctcttcggcgccagaaagtaggcttccgccagctggtccacagaggtcccctcccgatagcgccgatagatctcctgatttcgggccagggtctccgccttgcggccattggccgcgccccagggtttgcggctggtctcccgccgggggatgtacagatactccccgtcgatatacgcctggacctgggccagcaggtccggcggcagcacgtcggctgctttcatatagcgcatgatgctcctccaaagctcttgtgatttggaatgagcagaggctatatgccaaatctctttgtttgacgcgatagcctctgctatgcgtcaaacgccgaaacacaatgattcaattgcaactggattccctcatttccctgaccgctgcagccggttttttcagtggcaggaatttttttctgccgctgtcactataccatagatctccggggcagtcaacataaatccgttattacaggaagcaacaggaaaataccattcttggacaggtaccctaaatcctttaattatgtaacggtttatccgttcacgcacagcgcaaacgggtaaaccattatagtggaaaactcatcgtcgcaatagcgacaatgagttttccgcacaattactctcattaacctctttctggaatccatccatacttacccatttctactatattgccgtttatttcgtagtccaacctatataacacttcatccgaactcgacaaagcaaccgcttcaaatttaacatccatatcgctcctatcatctgtttttatttgtattacaacgggttgattgagaggagcttctctttgaataacagtatctccacttttgattctaatcgatctcacctctgggtcgtgagaaattgatacaacccaacccgcatccacatcttctcccacccaaaatttattaagaagttctacgccgctttctgttttttcttgtccactcgagccaacataccctctccataaaaattttgtttttttacagtaaacagtataatattgttctccagcatccacgagataaaatacgcaatttgaatttattctctcattgagcaggataactggagcttctgccggataaaaacgcacagcttttacggcgctctctggtgtaagtcgatacccaatgaagacattacttataatcgtaataactataagtatggcggccatttttaataaatttgtttttgtgttttttttcaatctttcctccaaaattatttatcacaatgcccctggtatataatatactaggggcatcgtgatggaatttactttttaccagcctgtctggaaattctgtttgtatgatgttgatgcactgtgacctacaacagatccattttcaaaatttgcatcaactgttgtagttgcactaagagaaaacgccgttgcaaatccgcttgctgcactgatttgaggccaatttagtgtcacaaaattcacattattgtatggtcccagagttctttcataaattttgcttccgcttgttaccgcaggtggccacgaaaccgatacttgcagccctgttgtttcaaatgtctcagtaatataaatggagcttggagtataatcagggcttgtataagcagctttacttaccccccaacaacccaaagatatgcgtaattattatcaatacttttacaaaatgttccagactgggatgctgttaatgaaacatctgttggagagtgttcactcgtgttgaacttctttgacgcggtagccgtagggcccgatgcaagaggcatcggagcatccgaagccatttcagattctatctccctgattgcgccttccatgtcagtctctgttaagccctcatcagtaaactcatacgttgtgacaataaatccctgatcgtcatacgttttcacagtcgtggagataccgttgatttcaatattttctgtgctaatcaatcggttgtcttctttttcaaactccgtagctgaacctgtaatgccacatgacagtaccatcacaagagccaaaaccaacgcagcaatttttttcatagaagccgcctcctttcaacatccctaataatttacaaatccggaaacactcactttgtaactggagttgtttcttaccgcaaatgtataggtccctctgagatcgatcctgatcgtctggttaatgctcccgttgcttcctcgtacagggtaaaatagcccgtcggagtcgatcagtccgaagtcgacactcgctgacgccggagaataagatgccgtaatggtaacggtttccccatattccatcggaaagctggtgcttgcttttctcatgctcttcgcagaaatctcaaaatcaaactcgcctgtggctcttggttctgcgatctctgttgcctgttctccaatatcagctgcaacggcctgagcgggaatacagctaaaaattgcaatacaggcgaacaataagcacagatatcttttcatccccattggtttcacctccttcctgttactcccaattcaagttaaaatccggctcttccaacaacgtactttcttctccctgaattgaatgtaaatccaagccattttccttctgccctcttccataccagaaaaggaagcataccagcagggccaaaacaacggcgccgatcacaagcagcctcatccactgcttttcttttttctgtaccttctgctccggcgccctctctgcagccggggccgccggagcaggaagttcgtccccgctttcatccagcaaatactccagcgggacgttatagagcctgctcagagattgcagattttctattgatggcctggacgtccctgtttcccattttgttacggcctgccgggacacatccagcttttccgatacctccgcctgggacagcccttctctttttcgcaaacaggccaattttttctctagggtcattgtttacatctccaaatctatcccagcaagaaatgaaagtaaaccgcccgcggcttactttccggcaaccaacggttgccaactgggttttttatcctttttttgaggtttccatgccccggaatgtccgctcacgctgcgccgctgcacatatcacgttggactttcaaggggggccgggcaacaccaaacagggggatgccgcctccttttcagcccggtagttggtcttgcgcacagaaccgacatcccaccccgcttggaaatcggccctatggtatcatctccggcaggggctgtcaagcctgcggtcccgggcaaaaaagcagccgcagagcgttgctctgcggctgtttcatttggttttacaggccccgccactcctccggccggaggcggctcaggtcgtgctccgccgcgtcgatggtgcggagcatggcctccttgtcccggttcagcgtgcccttcagcaccaggtagttgctggcgtgattcatccggaacacgctgccggggctgtccagatgctccatcagcagccgggtttcctccagcacctggggctgggtcagcagttggaagctgccgtcccgcacccagtcgtaaaggggcgtctccggctccaccatcagcgtcagcatcccgatatactccgggttcatggcgttgaaggcctccgccgtctcgatggcgtggcgctccagcagctccgggccgcccaggcccgtgatggcggtgacggacagcgccatgccgcaccggcggaccttccggcccatctccacgatctcggcggacatgtggcccttgcgcatccgcttcaaaacatcgtcgcacccggactccagtcccatgtagaccatggtcaggcccttgtcccgcagcgtccgcagctcctcctccgtccggatacggatggaggcaggggacgcgtagctggtaacccgctcacactctgggaacagctcccgaatggtgtccagaatggtgtaaagctcattcgctttccggaccaatgcatcgccatctgccagaaacacccggtccacccggcggtacacgccccgggcgatgcggaagtcctccagcacctcctccaggggacgaatggcgaagtgcttctccttatacatgctgcagaaggcgcaggtgttgtggctgcacccgtaggtcacctggacgatgaggctgtacgcctcagagggcggacggtaaacgcttcccttgtatctcatacgcccagcttctccagggccgccatcttcaggcagacgcacagcacggcgatggcctgctccagctcctcaacagggggcagggaaggcgcgatgcggatattgctgtcctggggatccttgccataggggaaggtggcacctgcgccggtcatggtgacgcccgcctccttgcacagggccagcgtccgcttggcggtgccgggcatggcgttcagagagacgaagtagccgcccttgggccgccgccaggaggcgatctccagcggcgcgatctcccggtccagcgcgtccaccacacagcggaacttggggcccatgatggcggcgtgcttcttcattagctccagggtgtgggccttgtccttgagatagagcacatggcgctgctggttcaccttgtcgaagctgatgacctgaacggtgaggagcttttccatgtaagccatgttggcctcggagcaggcaaagcaggagatgccggcgccgggcagggtcaccttggaggtggaggcgaactcgaacaccatgtcggcgttgccgtatttttcacactccgccaggatgtccgggaactccacatagtcccctcgaactcatggatacagtaggcattgtcccacatcagcaggaagtccggggcggcgggcttcatagaggcgatgcgccggatggtctcggcggagtagatgatgccgtcggggttggagtacttgggcacgttccacatgcccttgaccgccgggtcctggatagccttctccaccgcgtccatgtccggtccctcgtccgtcatggggatggtgacgagctcaaagccaaaggactccgtcaccttgaaatgccggtcatagccgggggcggggcacaggaacttcaccacgggctccctgcaccaggggcgctcgctgtggagcaggccatgggtataggccttggagatggtatcgtacatcagctgcaggctggcgttgccgcccacgaacacctgctccggccggcagcccaggatctccgcgaacagccgcttggcggcgggcaggccactgagttcgccgtagttacgcacgtcgacgccgtcggacacgtagtcttccggcttctgcatcaggctgaaaatatcgctgaccagatccagctgcgccttaccgggcttgccccgggccatgttcagattcagtccccgggccttcagctcctcgtactcccgggtcacctcggcgtattccgccttccgctcctcggcggtcatcttgggataagcagtcattacagcgcttcctttctgttgaaaaatctttacaaatccaattcagtatatcgttttttcaacaaacttgcaaccccatttctcctgggcgcaaacacgaaaagggccccgccgaaatgggcggggaccctgttccgctttcctcagcagccgccgcagccgatgcagctctctgcgcaggtgatggtggggtcgcaggtagaaatggtcgtgccgtagcggaccgggatggagacacagaccttctgggtcatagtcacggtgcacatggttccgtctgcattggtggcgcaggtgatggtgggattgccctgacaggtgacggtggggctgcccatgactgcggtgggggacaggatcacggaggcagtcacatccacacactgggtactgaccttgttgcagccgttcagggggcaggattcttcggactgatatggtaaaatgggctcatgctcataggcttcattgatacgcaaaggaattccctcgtttcatggaaattatatccggcgtttccgccctggatacaacccatcttatgcgcggcaacgcctgactgcgcctgtcagctctgctgaaattctgcaagggcccgccgcaggaagttcttggtctccggtccgcagaaggcggcgtccaccgccgcctcctggcaggccagcagttcctcacgactcatataggcgaattctgcggcccggcgcagctcctccgtcagggtcagcccgcccaggaaggtaggatcgtcccggctcagggtcaccaccgcccctgcatccagcagacgccgcaggggatgatcctcccgccgccggtacagcagtgtcaggttggaggtcaggcagatgttcagcggcacccgctcccgcaccagccgggccgtcaaatccgcgtcctctgccgcccggacgccgtggtccagccggtccgcctccaggagatccagggcgtcccgcacgccatccggcccgctgctctccccggcgtgggcggtgcggccgaagcccgccgcacccgccgccaggaacgccggacggaaccgctcccccgttcggcccgccagggcctcgttcccgtcaatggagaggcccgccagccggtgggtccggtgggctttcatatcctccaccagggccatggcctccgcccccgtctgggtgcgggagagagacagcgtgaatcggcagtctgcgccgccctgtgccgcagcccggtcaaacccagcggtcaccgcggcgatgatctccggtaccgagaactggggccagtgggtggggttcaggatcatctcgctgtacaggatatgctcccgtccactctccagcgcagcgtgctccgccgcctccgccagctcctccggcgtgcccacaaaggagcagatgttgtccagaaaggcgaggaagtcgctcaggtcctcagcagagcagtcgtacagccgctccgccgggcggggcagctcccgcccctgccgggccgcgaaccgcgccagcatctcccccggcatggtggactccagatggacatggagctccaccttgggcatgcgcgtcaaaaaggcagtcagatgttccattgcgtttgctcctctggttgttttttctataatgaatgtagggcaccggagggaaccaccggacccgctgttttccattataccataccggcgccgatgtgccaatccccggaaaatacccttcccttttgtcagagccgtgctataattctgttaggatcatgtaaatatttcaggaggagggctctccatgggtgaagaacaggaacagaaattccaccagctcacagaagaaccggtgagccggatgatctcccatctggccgttccctgcatcatcagtatgctggtgaccgctttttacaacatggcggacaccttttttgtggggatgctgcgcagcaacgctgccactggcgctgtgggcgtggtgttttccatgatggcggtgatccaggctgtgggctttttcttcggccacggcagcggcaacttcatctcccgggagctggggcggcgcaatacggattcggcctctaacatggcggccaccggctttttctccgccctgttcaccggactcctcatctgcgttttcggcgagatcttcctgacgcccctggccgcgttcctgggctcctcccccaccattctgccctatgccaaggactacctgcgcgtgatcctcatcggcgcgccgtggatgaccgcctccctggtactgaacaaccagctgcgcttccagggcaacgccatctacggcaccatcggcatcgccagcggcgccgtgctgaacatcgggctggatcccctgctgatcttcgtctttgacctgggagtggcgggcgccgcctgggccaccatcatcagccagttcgccgggttctgtctgctgctggcgggctgcacccggggcgccacccttcacatccacatctcccgcgtccagctgaaatggtcctacttcaagctcatcatccagggcgggctgccttccctggcccggcagagcttggccagcgtggccaccatctgcctcaaccacgccgccatgccttacggagacgcggccatcgccgccatgggcgtggtccagcggatcaccaccttcggcgcctccgccatgatcggattcggccagggcttccagccggtgtgcggcttcaactacggtgcccggctgtatcaccgggtgaaggagggcttctggttctgcgtgaaggtggccgccgtctttctgctggtgatcggggcactggggttcgcctttgcaccgcagctcatcgccctgttccgggatgacccgggggtcatcgccatcggcacggtagccctgcggttccagcgcgtgactttcttcttccaggcgtggatcaccatgagcaacatgatgctccagaccattgggcggaccgttcccgccacctttgtcgccatggcccggcagggcattttcttcattcccctggtgtggcttctctccctgtccccgttgggacttctgggcgtccagatggcccagtccgtctccgatcttctcactctggcggcggctgtccccattcaactgtatgtactgcgccagatgtcacagatgcagcccgccaagatttgaacccgaaacaggaaaaagcaccctgcggccgacggccgcggggtgctttcaggttgtcttacggtcctctcatgcgggcagcagcgcctccaccgcggcggccagcgcctcaccctcccgaatggcataactccagtccggatcctgatagacggcgaagagcccgtcctccatggagagtaccacgtgcagggcctcctctccgccgacgacgttcacctccaccatatcccggaaggaatgcgccgggagtccgccccgggaaatcagaccgcgggaggcgccctccagcagatccagcacctcgtccccgtccacctgggacgagatctcctgtccccggtaatagagcgaggtgagccggtactccacctcctcgtccaacacgggagccgacagggacagcaccaccgctccggccgccactgccagcaccgcaacgatcagcaccacaatgctctttcgcatcccatcacctcctgttttttccattatatccggctccgctccccgctgtcaagcaagaaagcgccgccaaaggcagcgcttttctgttcggctccgcggcgcggacaagctgttattccgcaggttctgcccggcgcagagcctcatccgccgccgccagctccggaaagacgggcgaccagaggcggaagcaccgcccttcgatcatgcgccggtaggcaaaggaatcccgcacccgctccggcaggaggacgccagcccggcactcgtcaccatcctcgtgggtgtcagaccctgccaagcgcagatactccgggtggcgcttcgccagctccagggcccggtcgttatggttttcatggcggggatgggcgttgaggatctccgtgccgtggacagcatcttcaaataccgtggtattgccgtcgcggtaagggtgggcgtggacgatcagtacttggtcgtggaatttccggtagaactcccgggcgctcatgcagcacagatatgggttcgcccgcagccacgtctcgtcaatgccatagaccagatagtcgttgtcgttctccgggaagcgcagctccgcccccaggatcacatccagccccagttcgtctccccgggccttggaggcccggtagccggcaagatagtggtcgatcacatggtcccagttgtggtccgtgtcaatccgggacaagtactccgggtggaggtgatctgtcaccaccaggccggaaaatccgtgcccggcatagcgatccaccacctccgccgccggcagatggccgcatttgctggtctccgccgtgtgggtgtgggggtcgtagagatactctttcatagctgatcgcctcttcttatccgtcaagcagtgcgccgcgccgcagaacggcagacgtctctcatgtcaacgccctgcaggagctgcgcttcaccagactgggcatcaggatctgatggacgtagccctgggtgccccgctcgatcttatccaacagaatctccaccgcctgaagggccatctcccgcttggactgctccaccgtagtcaggtcgatccgcggcatggcggcagatgcgatgttgtcaaatcccatcagactcagctgctccggcaccctgatcccaagctcgtccgccgcccgcagaatccccagggcgttggagtccgtggaggccaggatggccgtatagtccaggggcttggtaaacagctcccgggccagctcatagccgccggccactgaggagcggggaaagctgctgtccacaatccgcggtgtcagccccatgtcccggcaggcccgcaggtagccctctgcccgcagctggtgggtgacggtgtgcctgcggccgaagtacaggatctcccggtgccccaggctccgcaggtattccatggccaggtaggtggccccggtattgtccgtggtcacacagctgaggggttcgtcccgcagatcctcgctgaggaagaccgtgggcacctgctccgtgtagacccggagctcctcacagctccggtgctcctgggggacgatcagcatcccgtccacctggcggcccaccagcagctttaccaccgccttctcctgccgcagatccggcccggagttgcacagcatgagattgtagccccgcgcccgggcgctcatctccgcgtggtacgccagctctgccatgaactgattgtcaatagaaggcactaccagaccgatcagctccgtcctccgcatgaccatggagcgggccacatagtttttggtgtagcccatctcgtcgcacaggcgcaggatccgctcccgggtctcccgcccgatctgtgggccgcctgacagagagcgagagactgtggaataagagacgcccgccgctcgggccacgtccttcagcgtgacgttcttcatctgactctgcctttcccgccgccggtgcggcgcattctgcgcaaacgctttccccacccgccaaagccggccggaggcgtatgccgtcccatatagaatagcgaatttgccggggcttgtcaattacagaacgatgcagggccttccgccgcaagccttgccgcccgtaggtgtttctggaaaatcgaggaaaaccttgaagtgctgctttccatggttttcctttctctggagagtcactccccctgcgcctgtgtaccttcctatctccggaagttattcttgtgaaaattcaaactcatattgactccgtataggaggatggggtaaaatatagaaaatgtcagggttgatttttggtcaaaaccaccatatttttgtgcagacattgggaaatccgccgatacacgcttcttcaggttcgccccacggcaccaccggcgggacgaattttcaaaaacctttgataacccccttttcatgttttggaatttgtggtattctgaaagcgaagtaatcgttttgctttttctgttggcgcacacacattgcattctcacttctcagcgacctgtccccctgtcgaacctatgcggcgcaggtttccgcgcggcgtgcaatttaagtgaaggaaaggaagaaacaccccatgaacgaaaaaaagtgcaaagttctggcggctgagatccggctggaaacgctgaaggtcatccactcccggggcttcggccacgtgggcggctccatggacctggcggacctgatggccgtcctgtacggagaggttatgaagtttgacccgaagaacccccggtgggaggatcgggattggctggtcctgtccaagggccacgcgggccccgtggcttacgccacttttggcctgatgggctactatcccatggaggaagcttataccctcaaccatcctcacaccaagttccccagccacaccgaccggaagctgacccccggcgtggatctgaccaccggctctctgggccagggcgcctccaccgccaccggcgccgctctgggcaacaagatcgatggccgtgacagccacgtgttctgcgtcatcggcgacggcgaggccgacgagggccaagtctgggaggcattccacttcgcatacgcccacaagctggacaacatcatctacttcatcgacaacaacggctatcagctggacggccccaccgccgacatcctggaccacggcaacattgccaagaaggcggaatccttcggcctgtatacccaggagatcgacggccatgatgtgaaggctatctacgacgccatccagaacgcttacgccaagaagggcgtgcccagctgcatcgtgctggacacctgcaagggcaagggcgccactttcgctgagcccaagcacgaccactcctcccagcccaatgaggagcagtgggccgaggcgctggccgccgcggaaaaggctctggaagacgccaagaacgcttgaggagggtgagagcaatgaacgtgaaactgatcggtaagcatgaaaaggactcccgggcctgccgggacggtctcgccctgaccctggacgagatgatggcgcaggacaagtccatctgctatgtggactgcgacctgatgggctgcatcaacaccaagcggctgcgggagcactatcccgaccgggcctttgaggccggcatcgccgagggcaacgccgccggtgtgtctgcgggtctcgccgccaccggcaagaaggttttcttccactccttcggtaccttctcctcccgccggtgctatgaccagatctatatgtcagctgcctatgccgggctgacggtccatgttctgggttccgacgccggcgtcaccgccgcgttcaacggcggcacccacatgccgctggaggatgcagccatgtacctctccatccccgaaaccacagtgctggaccccgccgactatgaccagcttgccagtatcacccgccaactggtgaacatcgacaagggcgtcacctacacccggttcgtccgcaagggcatcatccaggtgtacggcgagggaagcgagttcgagatcggcaagggtgtggtgctgcatgagtccgacaaggatcaggccaccatcatcacctccggcatcatggtggacgagtccctgaaggcctatgaggctctgcaggcagagggcatctctgtccgggtcatcgacatgttcacctggaagcccctggacgaggagctggtggtcaaggccgccaaggagaccggtgccatcgtcaccgccgagaaccacaacgtcacctgcggcctgggttctgttgtggccaactgcctgtccaggaacgcccccaccgtacaggaatttgtgggcgtgcaggaccagttcggtcaggtgggtccccaggacttcctgatggacgagtacggcctccgcgccgccaacatcgtggccgccgtcaagaaggccatcgcccgcaaataagttcagatacccggcggggtccctcaggggccctgcctgtatcgccatatatcattttgaaaaggagacaagaatcatggatgctttttccgcttccctgatggctgacaagcgggagattattttcgctcccacagtgtacaagttccagaccttcgcccagatggcggaggagttcaagctgaacgagcgggacgtggtgctgaccaacgagttcatctatacccccttcatgaaggatctgggcctcaagtgccattatgtattccaggagaagttcggtgccggcgagcccagcgaggaaatgatccaggtcatgtacgacgccatcccctacgacagctacgaccgcgtcatcgccgtgggcggcggcgccattatggacctgtgcaagctgctgggctgcaagcgccccgataccgtccacaacctgtacttcaagcgattccccgtggtgcacgagaaggacgtcatcgccatccccaccacctgcggcaccggctctgagtgcaccaacatctctgtggctatcgtcaaggacgagaaggacggtgtgctcaccggcggtgagaccaagctgggcctggtgtccgacgacatcatccccaacaaggtgtgcctgatcccggagctcctcaagaccctgccctacaagcccttcgcctgctccgccatcgacgccctggtccacgccaccgagtccttcctgagcccccaccgcaagaccatgacctccgagctcttcagcgagaaggctatggatgtgattctgaaaggcttcaagctgatcgacgaaaagggccaggacgcccggttcgagtatatggatcagttcgtgaccgccagcttctacgccggcattgccttcctgaaggccggctgcggcccggtccacggcatgagcttcccctgggcggcacctatcacgtgccccacggcgagagcaactatatgctcttcggcgccatcatggactactatgacgagcacaagcccgacggtgagatcatgaagttcaaggagctggtgtccagcatcctgggctgcgaggtcaaggacgccatccccgagatgaacgccctgctgcagcgcatcctgcccctgcggcccctgcgggactgcggcttcactgaggcggacttcaaggccttccccctgtccgtcgaggccaaccagcagcgcctcatgaccaacgcctactaccccttcgacctggagtccgaagaggccatctaccgcaagtgctattaaaatttttccagacaacgaagggagagacggcggctgccgtctctccttttttcctttcgccacgcggtttctttcctctatacaccgcacctttctttgcatttttgtacagtacacacaaaaatataatgaaatcaaaaacattttatgggcgttctttttgagattgaggattgactttccgaaagagagccgctacaattggaaacaacatcaacgggttgtctgttttgaaaggagtggaacaccatggcattttacacgacgtcttcccagtccatgatgatgaatggtgcgtccgctcgccaggcggcgtctgcttcctgcgcctattccacggagatgtcccgtgcttccatgatgaatattgctctgattctggacgccattctgctggcgtccattattatttgcgccctgattccccttgccattctggtatccgtactggcagtggccctgtttgttctggtactggtattgttggcagcagagtatcatcatacgccgagatcgcgacgaggtgcataactgtttgatacagtaaagcggctccgcatctggcggggccgcttttttgtataatctgaaccaagaaaaggagattgcaagatgaaaaagaagttctttgccctcatgatggccatggttatggtcctcagcctggccgcctgcggcggctcggatgaagccgactccaactccggcgattctgccggcggggagagctccggcagcagcgccttcaaagtcggcgtcattggccccctgaccggcggcgccgccatctacggcacctgcgtggccaattccgcccagatcgcggtggacgaaatcaatgccctgggcggcgacatccagtttgagctgatgactgaggacgacgtcaacgacgctgagacctccgtcaacgcctacaacgccctgatggacgacggcatgcagatcctggtgggcaccgtcaccacccagccggccctttccgtggtcccgctgtcctatgaggaccgggtgttcaccctgaccccctccgcctccggcgacgatgtcatttccatcaacgacaatgataacgtgttccagatctgcttcaccgactccaaccagggctcccgttccgcccagtacatcgatgagaacttcgacagtccgaagatcgccatcatctacaaaaacgatgaccaatactccatcggtatccgggacaacttcaaggcagaggccgattcccgcggtatggacatcgtctatgagggcaccttcaccgaggccagccagaccgacttcaacgtccagctggctggtgcccagtccgccggcgccgatctgctgttcctgcccatctactatacccccgcctctgtcattctgacccaggccaacgccatgggctacgcccccaccttcttcggcgtggacggcatggacggcatcctgaccgccgagaacttcgatgcctctctggctgaaggcgtctacctgctgactcccttctccgccgactctgaggacgagatgacccagaacttcgtggcggagtatcaggaccggttcggcgagatccccaatcagttcggtgccgatgcgtatgacgccatctacaccctgtatcaagccatccaggccgccggcgccaccgccgacatgtccaatgaggagatctgcgatgctctgatcgaggtcatgcccaccctggccgtcaccggcctgaccagcgccggctccgagatgacctgggacgaaaacggtgctgtgtccaaggaccccaccgcagtcattatcgaaaacggtacctatgtcactccctgacagcggaacacacactccactgtaatagaggacagggatcggctgccggaactccggcagccctccctggacttctatggtggaaaccgacgcggggagctgtcaccgccccggtttctgccatagaaggggaaagagaggaaaatacttatggaatttctatcctacctgatcacgggcatcagtctgggaagcatctacgccatcatcgccctgggctacaccatggtatacggcattgccaagatgctgaatttcgcccacggcgacgttatcatggttggcgcctatgtgtccttttacgtgaccatgtttgcaggcagcaacctgctgggagaggatccctccgcactgaccaccggcgctgtggctctggtgtccgtgctgctggctatggtggtctgcacggttctgggcgtggtcatcgaggggctggcttaccgccccctgcgccaggccggcagcctggcggtgctgatcaccgccatcggcgtcagctacttcctgcagaacgcagcgcagctgctgttcggcgcgaatcccaagaacttcacccccgtggtcagcggccagctgacgctgtttgacggacagcttcggatctcctatgtggcgctgctgaccatcacggcctgcgtggtcatcatgctggggctgaccgccttcactggaaagagcaagatgggcaaggccatgcgggcctgctcggaggaccggggcgcagcccagctgatgggcatcaacgtcaacgccaccatctctatgacctttgccatcggttccgccctggcggccatcgccggggtattgctgtgctcttactctccggtgctccagcccaccaccggctccatgcccggcatcaaagccttcaccgctgcggtgttcggcggtatcggctccatccccggcgccttcctgggcggactgctgctgggcgtcattgaggccatggcgcaggcctatatctccacgcagttgtccaacacgatcctgttcgccgtgctgatcgtggtgctgctggtcaaaccgtccggcctgctgggcaagtatgtgcctgagaaagtgtgaggtggcggtatgaaaggctatttcaaaaacatgaaaaccatcaccaaggtggacttcgccacctatctgggcgtgatcctagcctttattgtggtgtcggtctgccaggcccagggactggtgaaccgttctctgggcggtatgctggttcccatctgctgctacgtgtgcatgtccatctccctgaacctgaccgtcggcattctgggagagctgtctctgggccatgccggcttcatgagcgtgggcgccttctccggcatcattgccgccatgagcctgcaatctgctgtcccaaatgatctggtgcggatgatcgtcgccctggtggtgggcgccttctttgccgccatcgtgggcttcatcgtcgggattccggtgctgcggctccggggggactacctggccattgtcaccctggccttcggcgagatcatcaaggatctgatcaactgccttctggtgggctgggatgagaacggcctgcacatcgccctgaacgtggacggcaccaagagcatgtcctctctcggcctcagcgaaaacggcatcgaaatcatcaagggcgcccagggcgccacgggcaacgcccgcatcgccacctttgctatgggctttgcactggtgatgattaccctggtggtggtgctgaatctggtccgcagccggaccggccgggctatcatggccatccgggacaaccggatcgccgccgagagcgtaggcatcaacgtcaccaagtacaagctgattgccttcgtcacctctgcctccctggcaggtgccgccggtgccctgttcggcctgaactactccaatgtcactgccgtacagttcgacttcaacacctccattctggtgctggtgtatgtggtgctgggcggtctgggcaacatctggggctccatcgtggcaacagttgtcctgtatgtgctgccggaggccctgcggcagttctctgactatcggatgctggtgtacgccattgtgctgattctggtgatgctggccaccaacaacccgcaggtgcggacgctgattagccggatcattcccagaagaaagggggcagccctcgatgagtaagaaatttgaaaagggcaagatggtccctgttcccagccatgccatcattccggagcgggacatcgacaaatcccccattctggagtgcagccacctgggcatcgacttcggcggcctgcgggcggtgaatgacttcaacctcaccatcggccggacggagatcgccggcctcatcggccccaacggcgccggcaaaaccaccatcttcaacctgctgaccaaggtctatcagcccacccggggcaccatcctgctggatggactggatacctccggcaagaccacagctcagatcaaccgcatgggcattgcccggaccttccagaacatccgcctgttcaacaacctctccgtggaggacaatgtgaagatcggtctccacaatcaggagcgctactccgccatcaccggcgttctgcgcctgccctggtactggagccgggaaaaggccgctcatgagcgggcactggaactgctgtccctcttcgggatggcggacttggcggaccatcaggccggttcccttccctacggcgcccagcgccggctggagattgtccgggccctggccaccaatccctctcttctattgctggatgagcccgccgcgggcatgaatccctctgagacggcggagctgatggagaatatcgtcaagatccgggacacgttccagatcgccgtcatgctgatcgagcacgacatgaagttggtcatgagcatctgcgagggcatctgcgtcctgaacttcgggcaggtcatcgccaagggcaccgccgaagagattcaatccaaccccgccgtcattgaggcatatctcggtaaacagaaggaggcgtgaccatggaaccgattctgaaagtcagcgacatcaacgtctactacggcgccatacacgccatcaagggcgtctctttcgaggtaaatcccggagaggtcgtcaccctgatcggcgccaacggcgccggcaaatccaccacgctgcagactgtctccggcctgctccactcccgcaccggctccatcgaatttctgggggagaacctgatgggcgtcccagcccacaaggtcgtggccaagggactcgcccaggtgccggaggggcggcgggtcttcctgcagatgaccgtagaggagaatctggaaatgggcgcctatacccggtccggcggcgacatcgacgcggatctggaaaaggtctacgcctatttcccccggctgatggagcggcggcggcagatcgctggcaccctctccggcggcgaacagcagatgctggccatgggccgggcgctgatgagccgtcccaagctgctgatgctggatgagccctccatgggcctggcacccattctggttgagcagatcttcaagatcatccaaaccctccatgaggcgggcaccaccattctgctggtggagcagaatgcccaggcagccctgagtatcgccgaccgtggctatgtgctggagaccggaaaaatcgtcacctccggcaccggaacggagctgttggcctccccggaaatcaaaaaagcctatctgggcggctgaagtctcagaaaaaggagagcgtgtgctctccttttttctttgcaatctgccgggcatgtggtatactgctgtcatgacggaaaggagggatcccatgcgcgcggaagaacggcggcaggccattcgggagcttctgcagcgggcaaagcagcctgtcagcgcaacggccctggcggctcaattctccgtcagccgacagatcatcgtgggggatattgccctgctgcgggcggctggagcagacatctccgctacgccccggggctacgtgatcctgcgagagacgggaggtctggtgcggcaggtggccgtccagcacgatgccgctggtatgggagaggagctaaacgctatggtggaccagggctgcacggtactggatgtcattgtggaccaccccatttacgggcagctgaccggccctctgcagctctccaaccgctatgatgtggggcagttcctctcccgctgtgcgcagtccgacgcccgcccgctgtcggaactgacggaggggatccatctccacactctctcctgtccggatgaggcggcattcggccgggtgtgccgggagctgcggcggctgggcgtcttgctggaaggttgaacatgtaaaaaagcagttgacaggaaccgggattttgtgtatgatacggtttgcaggtgtcaagacacctgtaaaccgtattttttgattctacataaagcaggtgtctcccatggaacaggtcaaaggctttctgaagcgcaaaaacattgtgatctccgccaagcggtacggcattgacgccctgggcgccatggctcagggactcttctgttccctgctgatcggcacgatcctcaacaccatcggcacccagttccacattggctttctcaccgcccaggtcatcaccatcaatggcgtggggtataccatcggtggactggcgtcgttcatgagcgggtccgctatggcggtggccatcggctacgctctccaggcgccgcctatggtgctgttctccctggtgacggtgggctatgcctgcaacgccctgggcggggcgggcggaccgctggccgtgctgttcgtggctatcatcgccgctgaggtgggcaaggccatcagcaaggagacgaaggtggacatcctggtgacgcccatcgtcaccatccttgtgggcgtgggagcggcctggatcattgcgccccccatcggcggagcagccagcgcctttggccagctgattatgcggaccacggagctgcagcccttcttcatgggcgttctggtgtccgtgctggtgggcatcgccctgacgctgcccatctcctccgccgccatctgctccgtgctgggactgaccggactggcaggcggcgccgccgtagcgggctgctgcgccaacatggtggggttcgccgtcctctccttccgggaaaaccgctggggcggactggtgagccagggcatcggcacctccatgctgcagatgcccaacatcgtgaagaacccccgcatctggctccctgccatcctcacctccgctgtcaccggacccctggccacctgctttttcaagctggagatgaacggagaccccatcaactccggcatgggcacctgcggcctgtgcggccagctgggggtctggaccggctgggtcaatcccagtgacgcggctctggccaatggggccgccgccatggcccccaccgcctttgactgggtgggactgatcctgatctccttcgtcctccccgctgtcctcacctgggccttcgggctgttcttccggaagatcggctggatcaagccgggggatctgaccctgccgcagtaggtaaaatgcccggaccgcgatgcggtccgggtaattttatttgttcaggccaaggaacacgagacagccagtcaagaaccacgggctgtatcgcataagtgtatagtagttcatatttttgatccaatcaacaaacccaggaatatttgctaaaaaatgaatctatgcccaaaacaataaatcacaaatattagataatacccaatggcaacagcgccaaatatcaaagccatcatccgaagccgcttggatggcaggcggaggtcgacaaccaatgccgtaccggacatcaaaaggcctccagccgccagagcagcagctgacggcacagtcaaagcgtaccatacccacggcataaggtcatatgtttcccagcaaatctgctgcacaaagggccttaatactgtttccagcacgcagaatatgaataacaccgctacacagatggctgccaaagctgcatacttccgttgaccgcgtcgataactttcctctcgccccgggccgtagatcagctcccggacgtcggcgttcagcgcctccgccaaggtggtcagggtctcgatatccggctgggtctttccggtctcccaggaggacaccgcctgccgggtcacatggagccgctccgccagggcgtcctgggtcagcttctcccgctggcgcagctgcttcagattttttcccaccgcgttcacaacctcgcctcctgctgccagcgtaccacagtcccggcgctttgtcacgcaacaaagtgttgcgcgccctgcaagggcttgcggcggaccgcgggatatggtatcgttaggatatccgagatcaaaaacaggaggaactgtcatggaataccggaaatttggggacgcctacatcgtccgcctggaccgggacgaggagatcctggcccagctgaagatcttcgcagaaaaggaacaggtcaaactggcctctgtcaccggcctggggctgtgaaggacttcaccgtaggagtgttcgactccagcgccaaggcttacaagtccaaccgcttccagggggtctatgagatcgtctctctggtggggaccatcaacacgatgaacgacgcgttttactgccatctccacatgtgcgccgccgaccaggagggccacgctttcggcgggcatctgaacgaggccgtcatcagcgccacctgcgagctagtggtcacctgcctgcccggagagacgaaccgggtattcagcgacgaggtgggactgaatctgatctccttctgaaatccgcggaaaagaggctgaggagtattcctcagcctcttttccgcttttgggggacgctgtcctcacccgaaggcccctgccgcgtggtcccgcagaggcagctcctggaaaatggatgcctccaccgcctcgtactcccccggcgtccgaaggcggcgcattttcttgtcatggcgttcgccgccctcgaacaggtggatcaggaagaaccagacctccttcatccgctgggccgccgggcccacctggccatagaagtcctggtaggactgatacagcgtccgggtgaaggtctggagctcctgccgggtggtggggacgccgccccggagcttccgcagcagggccgggtccgcgatggcccctcggccgatcatcaccgcgtcgatggcaggaaagtccaccgcaaagactgtgcagtcctccacggtcaccagatccccgttgtagcacaggggattccggctgcgctccgccgcccaggcgaaccagtcccggtgcacggtccccttgtagaactgcttctgcacccgggggtggatggtgaggcaggcgatgggataacggttgtaaatgtccagcagccgctcgaactcctccggctccttcacccccagccgggtcttgatggacaccggcagcttcacggcggcgaatacctcgtcaaagaaccgctccagctcctccggctttgccagaaagcccgcacccttgcccttggcggtgacggtgccagagggacagcccaggttcagattcacctccgtatagcccatgtctgccacgatctccgccgcccacagaaagtccggtgcccggcaggtcatcacctggggcaccacaggaagccctgcgttggccgccgggtccagctcccgttgatcccgcttggtcaggatatgctgatccgtaggggagaaaaacgggatgaaataccggtccgccccgccgaacatccggtggtacacctgccggaacaccaccttggtgataccatccagcggggcgaagtcgtaccgctggatcatcccagtgccgtctcccactccgcctggcggaagccggtgcggacgaagtcctcccccaccagaatgggccgctttaccagcatcccgtcggtggccagcagggccagctgctcctcctcgctcatctccggcagcttgtccttcaggcccagagccttgtactggaggccgctggtgttgaagaacttcttcaggggcattccgctcttctcccaccagccccgcagctcctccgccgtaggattttccagcttaatatcccgggcctcgtaagagacgccccgctcgtccagaaaggctttcgccttctggcaggtggtgcacttggggtaccacaaaaacaacatgatgctctctccttcttttgatctgtctgctcagtagctgctgatctccaggctctcgtcgtcccggcccttctcgatggcccggatctccacccagtatttcacctccggactcacctccacctggatccggtctcccacctgacggcccagcagagcctttcccacaggggactccttgctgatgaggccctttaaggcatcctgccgcaaggtggtgacgatctgcagcgtcatctcctgcttcgccagctcgttgtagatcgtgaccttgtcgaacaatcccgctcggtcaccctggtccttcacctcgatgaccttggcagtgcggatcatccgctccaggtagcggatgcggctgtcgttgcggttcttggcctgcttggcgcacttgtactcgtagttctcgctgaggtcgccgaaggcccgggccgtctgcacctcctcgatcagctgaggacgcaggacccgggtccggtagttgatctcctcctgcatctttttgatgtccacttccgtcagttcgtcgtacatgacacagctccttttcaggctggggtcgcggtccgggtccgtttgctttgcaggtctctcacaggtgtggggaacccggcgcaggtgaaatgcgaaatcgccgctctgcggctattctaccacgtccggcaggaaagcacaaccccggcggctccctgccccggcaccctttcctccgccgggaatagaatgaagtgtatcacgagtcgaggaggcaattgaaatggaaagcacttccagcgcagtcaccatgtgcgccaccgtcctgcgggtctgcccctgcgaactgtgcgtctgcgaccacgagaactgccagcaggtcctggtccatacagacaacgcctgctgcttccgggtgggccagcaggtctgcatcgagttcagcggcgccatgacccggagctgtccgccccagatcaccgccgactgtgtccggccggtgaactgctgctgttgaacatttgaaaaagccgcccgggggcgaatccccgggcggcttcggcttatgggttgcattggccgcagggcgtatagccctgggcgatcagatcctcccggctgccggtatactcctgccggttggcggtgctcatgccggacacgctggaacagtccgggtcgtgaaatttgtggctgttggtattgaggatgtacgtggtctcgccgctttgcggctccgctccctcctgccagctctcgccggtggcgtagtcgatggtgatgccgggctggacgttgtacacatagacattgaagcagacgccttccccctcgtcctccacagaccaagcctccatctggacaccgctggctaccaggttctgaccctcgaacaccggggtcacccggtagaggacgtggttgtccgtctcctttacatagtccgccaccagattttcaaagggcagcatcccgtccacattcatatagcgggtgccggtgatgagattttcctcgttggcgttctctccggtgagctgaaagccgatcaggtgacagcggttgtacaggtactccccgtcgtactcccggttgatccagccggagggtgtgacggaactgatgctctcccggtcctctgtgggcatcagatcctgtcccacgttggcataggctacgccgcaacggcccagagtgtccaactcactgtacgtctcaaaggacacagaggtcatgtcctcctccggaaaatccggctggttgccatcgacggccacgtagggctccccggaccaggcgggaatatcctccagagaaaaggaggtgacggtgccctccgccgggggcatcatgcagccggagaggagcaggcacaaggacagcagcgccgccgtcagggaaatgcgggttcgattcatgggatatagacttcctttgtaatgatctcgtgggagaagccggggaactcctcccgccgggccagagtccagccctccagggacaggtcccagtaaaggtccgccggataggcccggtcccagcggtacagcaccacccgctccacacgcccggcaaagggcgccacagagcggtcctccacaaagcagggctcccctggccccgccttttccaaaaacgactcgtccacacaaaggcggctctgctcctccgccgggaactggcgagccgtggccccactcacccagaggcaggcctccccgacctctgccagcaggtccgcccgcaccgcccggtcccggctctgccggcggcagttgaaggccatgccgttccggccgtccacacaggccatcaggatcatgctgcatcctcccttcgcgctctttctctacgatacccaaattccgctcgaaacgcaaggaaaatttttcggcttccgccgggggaagccgccgtaccgggcggaagcccctcccgcctgggaggggcttccctttggaagatatccttacgccttgtccggacgcttgtactccacatggagcagctgatgggtgcggcccttcatcgctccctccaggagctttgtaacgatggggttccgctcagaccgcttgatgagggcggtgcggtccgcctcatagaggccctctgcccgctgctgcttcaccgggatcagcccgtagggctggccagcgccgcctacgcagccggtcttgcaggtcatgacttccaccaggtcgaagtactcctgaccgctctcgatatcgtccagcagcttctgtgcgttcaccaggccgtggaccaccgcgatccgcagcgcccggtcccccaccggcagcgtcaccgcccggatggtctcgctgccccggatgccggagaactggatggcctgcagggtgttcttggacttgtcctccactacccgccgggccacggcctccgccacgccgccggtggtgccgaagatggtagccgccccggtgcccatgccgaagggcaggtccggggactccccctccagctctgcgaaacggatgccggactccttgatcatcatgatgatctcctgcgtagtcagcaccagatccacatccggttttccgtcatgctggaactccggccgcttggcctccattttcttggcggtacagggcatgatggcgatgtggtaggtggtgcggccgtcctcttcgtccttcctggcgtactgatccttcagcaccgccgcgaacatctccatgggagacttgcaggtggagatgttcttcaggaagtggggccgctcctcctccacatacttcacccatgccgggcagcagctggtgaacatggggaaggggccgccttttttcagccgctccaggaactcgtccgcctcctccatgacggtcaggtctgcgccaaaggtggtgtcgtacacctcgtcggcgcccatcatcttcagggcggacaccagcttgttgatggcattgacgccgggctccaggccgaaggcctcgcccaccgccacccggaccgccggggcgatctggaacaccacccgcttcttcgggtcgtggagggcccgccacccccggccgatctcgttaaagatggtgatggcgccggtggggcaggcggctgcgcactggccgcagctgatgcagttggtctctccgagcttgcggtcaaaggccgggcacaccaccaggtcgctgccccggtgggcgaagttcaggatacccatgccctgcatctcctcgcacacccggatgcagtcgccgcagaggatgcacttgttgggatcccggacgatggccggagaggaggtgtcgatctcatagtggggccgggtgtccttgaagcggacgtgccgcacgccgaagcgcagggccagctcctgcaggcggcagctgccattcttttcgcaggtggtgcagtcccggcagtgagaggacagcatcagctccaggatcatccgccggtgctttaagagccgggcggtattggtgcggatcaccatgccatcccggggctccatggagcaggaggcgtcgatcttgccccgctcgtcctccaccacgcacatccggcaggcgccgtaaacagacagttccgaataatagcagaaggtgggcatatcgatgccggccttccggatcacagccaggacgtttttctccccgtcgaagggcacccgctggccgtcaatgtacataattccctttgccatggtactcccctcctcacttactggccgcgatggcgccgaagggacaattggtcacacaggcgccgcagttgatgcacttctccggatcgatgacgtggacctgcttggccgcgccggtgatggcctccatggggcagttcttccggcacttgccgcagcccttgcatttctccgggtcgatggtggggtggggtttttccttgttgcagatgggacagtggtggtccactacatgggccagatattcatcccggaaatacttcagcgtgctctggacgggcttgcaggcgctctgccccaggccgcacagggctgtcttactgatggtgtccgccagctcctccagcaggtccagatcctccagtgtgcccttgttgtcgatgatccggtccaggatctccagcatccgcttggtgccctcccggcaggggacgcacttgccgcaggactccttctgtgtaaactccatgaagaaccgggccgtctccaccatgcaggtgtcctcgtccatgaccaccaagccgccggagccgatcatggcgccgatgctcttcagactgtcgaagtccaggggcaggtccaggtgctcgcggctggcggtggtggcgccgccggaggggccgccgatctgaacggccttgaacttcttgccgccccggatgccgccgccgatgtcaaacaccacctcccggatagtggttcccatgggtacctcaatgaggccggtattcaccacgttgcctgtcagcgcgaaggccttggtgccggggctggtcttggtgccgatggagcggtaccagtccacgcccttgcggatgatgaggggcacgttggcaaaagtctccacattgttcagcaccgtgggctcggcccagagaccgtgctcgatggtccggggcggcttgacccgaggcatgccccggttgccctcgatggaagctgtcagggcactgccctcgccgcagacgaaggcgccggcgcccatgtttacatggatccggaaggagaagtctgtgcccatgacgtgatcgcccagaagaccgtactcctccgccttggcgatggccgctttcagccggctcacggccagcggatactccgcccggacataaatatacccctcgtcgctgcccacggcgcggccggcgatcatcatgccctccagcacgctgtgggggttaccctccataatggagcggtccatgaacgcaccgggatcgccctcgtcgccgttgcagacgatgtattttttctctgacttctgtttccgggcaccgtcccacttctggcccgcggggaagcctccacctccgcggccccggaggccggagtcgatgatggaccggcagatctcctcatccgtcatctcaaagagggccttttcaaaaccggcgtaaccgcccttggcgatgtactcctcaatgtcctcggcatcgctgctgccgcagttctccagcaccacccgatgctgcttcttgtagaaggggatgtcctcctgccgggggtaggctacgccgtccaggtgatacaccagccggtcgatgatctcgccgcccagcacggtcttctccagaatctcatggcagtcctccggcttcacatggatgtacatgacgcccataggctcgatgtggaccagaggccccatctcgcagaagccgtggcagccgctcatctttacatggaggctcttctccgcgtccgtgtcgtgtttgaggcccacgtagaccggcagaccccgtttttcacactccgtcttcaaattgtcatagatcttcatggcgccgccggcgatgcagccggtgccggcgcagatcaggatagagggcacctgctcgctctgcttcagggcgttgcgggcgttagcctggaacacgtggaagctgtcccgcgtcatctttacctgtctcatgcggtggccgcctcctttctgcggatatcctccaccagcgccagcgcatcttccggcgtcatcttggcgtggacctctccgtcaatggtcatgaccggtgccagtccgcaagcgcccaagcaggccacggtctccagggtaaacaggccgtccgcggaggtcttccgctttccggtcagacccaaagcgtcccgcaggctgtcataaatgggtccggatttgcgcacgtggcaggccgtgccggtgcataccttgatgatgtgccggcccttggcctccaacgagaaattctcatagaaagtggccacgctgtacacctttgccgtgctgatgcccagcttttccgcgatcagggtcagcgctccctcgctcaggtacttatactccccttggatctcctgcatgatcgcgatcaggttcgactgatcgcagccgtaggcgtcgatgatcgcctccgcccggtccagattctgctccataaattctcccctcattgattcggatgataaaaaacacgcgggatccgcacttgccggcggatcccgcgcttgtgtgctctgtttccgatatgtgcttatgcgtctgtatcagaatacgccctgctccatcatggcctcagccacccgcttgaagccggcgatgttggcgcctgccaccaggttgtagcccaagccgtactccgcggccgcgtccacgctcatctggtagatggtgttcatgatccggtgcagctgcgcgtccacctcttccgccgtccacaccagccgctcactgttctgcgccatctccagtgcgctggtggccacgccgcctgcgttcaccgccttgctgggcgccacgatcatcccgggctgctccatcaagaaccgcagcgcgtcgttggtggtgggcatgttcgccacctcaatgtagtacttcacgccgttggccgcgatctgcttcgcctgctccatgtgcacgtcgttctgcatggccgagggcatcaccacatccgccttcacgccccagggcttctcaccggggaagaattccacgccgaacttctccgcatagtcctgtacccggttgcggccgctggagcgcatctccaccagatacgcgatcttctcctccgtggctacgccgtccggatcatagatatatccgtccgggccggacaatgtcaccaccttggcccccagctgcgtggccttcttacagatgccccaggtcacgttgccgaagcccgcgcaggcgatggtcttgcccgcgatccgctctccctcgtgctccagcacgttctggagatagtataccgcgccgtagcccgtggcctccggccggatcaggctgccgccgtaagagaaccccttgcccgtcagcacaccgttctcccaggcccccttcagccgccggtactcgccgaagagatacccgatctcccggccgcccacgcccatgtccccggcgggcacgtccacatccggcccgatgtaccggtacagcgcctgcatgtacgcctggcagaaccgcatgatctccgcgtccgacttccccgccgggtcgaagtccgcgccgcccttgccgccgccgatgggcaggcccgtcagggagttcttgaagatctgctcaaagcccaggaatttgatgatgccgggatacacgttggcctggaaccgcaggccgcccttgtagggccccagcgcgccgttgaactggcaccggtagccgatgttcgtgtgccactggccccggtcatcctcccaggacacccggaaggtgaacatccgctccggctccaccatccggttcagcaggtccaccttctcatactccgggtgcttctcaatcaccggctccagagaggagaacacctcctccaccgtctgcacgaattccggctcgttgctgtgcttcttcttcacgttctcgatcacgctggtgagatatgcgttcatggctttttcctccaatcaaaattttgaaagccgtgggcacacaggcccgttcatatcaccagacaggaacggaaatacctctccgctcccgcgtctgtcctcataccacctctaacagccgttcacgttccgctgcgtttttttctccccctctccgccggccctctgccggcctccgcagcaatctcgctttcgctgtatccggcggacggcatctttcgatggccgttccgccccatgcgatctttccagtttgattgtagcaaaaaaacatattcttgggaagccctattgtgtaaaaagtacatttttctttattcactcattagtattttacaatattttccataaacgtttcctgtataaaccagaactatctgtagccagccgtggcggaaaataccacatctctcttcccgggtgcccgaggcagcggcaacgaagcggaaaaccaaaaagcctgtggtacaataacttccagatctttacctgtaaaagggctgtaattcagtcctccgcggttgaaagccttgtgccgtcatattcatcgcagtatcagccgcctggggcgatccgcttcaggttgcggctatgcactgccgcccaggtgagcggcggtcagagagctcagggcgtcacagcgaactcacagcatcgctaatcagtgtcaatattgtgggtaataaagcgggccctgaaattgcgctggttgcacatcgcccccaccatgctgccgagcggctgtcagggccagcgtaatcttcagggaaccgccgcagccgatgtgatccatattggccacctttgtaggacgatcttcttctggaggaacgtcccctcggcattctatatgtcgggagcccgttccatgacattccttccgggagcgtaggctaatcgacctgataaaaggaaatgccgcataccagcctcaacaggccgatatgcagcataaaatcggacgaaacacctggttcggtatctccggatgctgaaaacacagcggagtaaggctgaccttccgcaggagcggctttatgtgcggcagcgtgggtacagtttccttgttctttcattgcgcacagcgcgaaaagcattcataggcgcccaaaacagatgtcttaaaattcagcaaacacgctgagagagcaaagaaaacctcggaaccattgcagttccgaggttttctcatctggcagcgggtgaaggattcgaaccctcacatacagagtcagagtctgctgtgctacccttacacaaacccgctatgaagttgtgttcactccgcagcgaacagatattattatacagaaaagcgtgattttgtcaacccccttttttatttttttccacatgttttttcaagcgggcgcggaatcccgatcccgcgcccgccactatgtaagaccgttcactggccccgcaggccgtccagaaagccccggaggaatccgccgccccgtcgcctgctcccatctttctccatacggtccgctgcctcctgggcgcccgcatacccttgcttcgctgcggcctgatagagttctctcgcctgcctcagatcccggggcacgcctttgccgtgctcatagcaccaggccagattatactgggcacggggctcggactcctccactgcctggcggtaccacttcaccgcatctgcccagctctgggccacgccgacaccggtctcgtacagatatcccaggttgcaggcggccacccggtcgccgccctctgcagcctgccggtacaaatcggctgccttggccgggtccttcgccacgccgtggccgaactcccagcagacgcccaggttgcactgggcacgggggtagccctgctccgccgccgcctgataccagcggacagcctcttgccagttctgttctacaccctctccggtctcatacagatatcccaggttgcactgggcggccgcgtcctcccgctccgccgcctgtcggtacagccgggctgcctccgcggcatcccgctccacgccttcgccccgctcgtagcacacgcccaggttgcacatggccgccgcggaaccggcatccaccgccctgcgataccagtggaccgcctcttcccagttctgttccacgccgcggccgtatttgcagcagatgcccatgcagaacatcccccgggggtcctcctggtccgccgcctgtcggtaccagtggacagcccgcttccagttctgctccacgcccttgccgtactcatagcaccaggccaggttgcactgggcacggggcatcccctgctccgcagcagcgcggtaccaccgcaccgcctcctcccagctctgctccacgccctcgccgctctcatacaggaatcccagattgcactgcccggcggcattgcccgcctcggctgcctggcgatacaggctcacagccctgctcaggtcccgctccacgccctcaccgcgttcatagcacacgcccaggtcgcacatggccgccgcggagcccgcgtccgccgctttttgataccaggccactgcctccgtgctgttctgcgtcacaccgcggccatagtcaaagcagcgggccacgcagaaaagtcctctggcatccccctgctcggccgctttccggtacagacggtagctctctcccaaatcctgggggacgcccttgccgtattcatagcaccatgccagattgcactgggcacggggcaggccctgttccgcggcggcacggtaccaccgcaccgcctcctcccagctctgctccactcccaggccgcgggaatatgcctcccccagcaggaactgggccctgggaaagccgttttccgccccctttcggaagcactccaccgctttggaatcatcccgcgccacaccgatgccatgggcatagcagtatcccaggttcgtcagggcgggcatatagtcccgggcggcggcctgggcgtacagcaccaccgcctgccgggggtctgcaggcacgccgatccccgcctccaggcaccaccccaggttcgtcacacccagcatatcatccagggccgccgcctgttggtagcaggccagcgcgtccgtcggccgctcctcatccacggcccggttgcccagctgcacccagtcgggccccgtcagctcctcttcgtccacagagaggaaaaaggtgcccccgcactgggggcagacatccggttcctcctctgccagaaacccgcagtccgggttctcacagcgatagtaattcatctgcgcacctcctctgtatcaaagcgccgcttcatcctccgcagaggaggcgccccgcaggttgtaggcctccggaaacgcgaacgccctgccccggaatttgaagcccgggaacgtgtccagctggacgccgtgaatggcccggaacatgctcttctcaatattgggattggtctttttcagctcccgcagcaggagcttcatctcctgccgcttgctctcgcccacaccgtcggccgcaccgtcccgctcctctgtgaagcggcaggcgcactggagaaaccgcaacccattgtagttcttccaggcaatgatggcgtcctcatggacacaatacagcggacggatcaattccatgcctgggaaatttctgctgcggagcttggggggcatggtctggagctgggcaccgtaaaacaggcccagcagcgtggtctccagcacgtcggagagatggtgccccagggcgatcttgttgcagcccagctcctgagccttgctgtacagaaagccccggcgcatccgggcgcataagtagcaggggttcttctccacctgataggcaacgtcgaaaatatcgctccggaacacggtgatggggatgcccaggcgggcagcgttctcctcgatcagcgcccggttggccggggcgtagcccggatccatcaccagaaaaaccagctcaaagggctgttctgtgtggcgctggagctcctgcatcagcttggccagcaccatggagtcctttcccccggagatacagacggcgatccggtctccgggagcgatcagctcatacctcttgacggcggcaatgaaggggttccagagctccttgcggtattttttgatgaggctgcgctccgcagcctcctgtggtgtcaattcgcgggacatggggacctcctaaagcaaaatgggagcggccgcgtcagaaccagatagccaccagccgcagcagagaggcgcacattttgcgcagccaagaccgctgattccactccgccagcgtatagggcgcgctctgggccaccatccggtccatatcctccagcaggtcttccaccgcgggcatgtgatagaggagcacggcgcattcgtagtgcagctggaacgtccggtagtccatgttggtgctgcccaccagggccacctcccggtctaccatgacgctcttggcgtggacgaagccgggggtatagcggtaaatcttgacgccgtgggccagcagctcaccccagtaggtctccgccaccatgtagacatatttcttatccgggatggcgggtaccaccagccgcacgtccacccctgcgtcggctgcgatgcacagggccttctgcatggactcctccaccgcgtaatagggcgtggtgatatacagcatcttctgggcggaggcgatcagctggaggtaggtgtcctcgatgggattgtccggattgttcagcggaccgtccgtgaagggctggcaccagccggtgccctcgatctccacccggggacggtagtagtcgtcctcattgggcagggagcggccgatcatcttccacatctgaatgaactgggaggcaaagccccaggccccggcaccgtcgatccggacgccggtatccttccagtggccgaaccggacaaagaggttggcgtattcatcggcaatattgatgcctccggtgtaggcgtgcaccccgtcaatgacggcgatcttccggtggtcccggtagttgaagtaaatccgattcacgtagcggtggactggattgaagacctccacctccacgccagcgtcctgcagggcctggagggaggcgtcggaaaagcgggtgaggttgccgaagtcgtcgaagatgatccgcacctccacaccggcggcggcccgctcccgcagcacatggaagatccggtcccagatctggccctccgccaggatgtaatactccaggaagatgtagatctccgctctctggaggtggagcaccaggtcatcgaagaaatcggctccctccgcgaaataccgggcctgtgagccgccgtacagcaggaagtcccgcgactgcaaataggaggccagccgtccccaggccggggagcggcggctcaggtgggccacattggcggcgctggcctggcgggcgctctcccgctccaccggaggggcgaccttccgcagactcaggcttttggcctgatggctcccgccccacagaaggaaaagaatcataccggccaccggcagggccagcagcaggcacatccacaccagcttataggaggggctgccggggcgcagatacacccagatcgccaccactgcgccagccagctccagaatgaaatagacgtagctgatcttttccgccagcaactgggtcagcgccagcgtcagcacgatctgggcaatcaccgtcagtgcgcagatggacaggctggcggcggcggagatccgccgttccgtccgctcttccggctggggcagacttctttttcgcatggtgcggtccacctccttctctctcagcttcgaccgcttatcttattattataccgaaatacccagtactccgcaaccaatattctgtgaacaaacagccccgccggagggcggggctgttgggtcatctgctccggcagagcagatcctgcttgatgtcgaacagcttctgactcagatccacatagtaggtgtgagggttctcgaaccgcttcaccgtgtcccacagggtatccacctgggcacggcagtaggcctggatctccggcagggcgggcagctgatagaccagctctcctccctgaaagaccgggacctgaaggggctttgcggtaaagttcgtataggtcttgcgcttccaggtggccctgggatcgaagagctccagtggggcgctctcgtccaccgtctcgtcccagacggtgatgtagtccgcctccgccttgccggtggcgttgtcaaagatccgataggtcttcttgaagtggggaatggtgatcttgtccaggttttcgctgaccttgatcttggggatgatcttcccgtctccatcttccacagccgccagcttgtacacaccgccgaacaccggctcgctgcgggcagtgatcatccgctcacccacaccgaacacatcgatcttggcgccctgcagcagcaggtcctgaataatatactcgtccagggagttggaggcggagatctggcactcggtccagccggcggcgtccagcttgcggcgggcctcctgggtcagataggccatgtcgccggagtccagacggatgccgcacttgcggatgcccaggggcttcagcacctcatcaaaggcccggatggcatccggcacgccggacttgagcacattgtaggtatccaccaacagcgtggcattgtggggatagatctggcagtaggtcttgaatgcctcatactggctgtcgaacatctggacccaggaatgggccatggtgccgccggcaggtacgccgtacagctggtcggagatcgtgcaggcggtgcctgcgcagccgccgatataagccgcccgggctccggagatggcgccgtccgtgccctgggcccggcgggagccgaactccagcaccgttcgcccctgggccgcccggacgatccggttggccttggtggcgatcaggctctggtggttgatggtcagcagggtgaaggtctcgatcagctgggcctggatggccggcgcccggaccgtcaccaccggctcccgggggaagataggcgtcccctccggcaccgcccagatgtcgcctgtgaaacggaagtcccgcaggtagctcaagaaatcctcggagaacaggtgcttgtcccgcaggaaggcgatgtcctcctcgtcgaagtgcaggttctgaatatactggaccaactgttccagacccgcgcagaccgcgaacccgccgttgtccggcacgttgcggaaaaacacatcgaaataggtgatccgatcctggagccctgcccggaaatagccgttgcccatagtcagctcataaaaatcgcagagcatcgtcagattgagtttctcttccgttttcataaccgtttcccctgtgccgccggcacagatccttccatgaagtttcaggcccccacaccgctggaggcggtctgtccggggttgttattcccttgaattataagcggttcccccaggaaaagcaatgctttttccgaatttgttgtcaatcttttatcaatcgtcttgacaacaactccgccctcccctatgatggggaaagattgaaccgcacattttccggtacacagcggactggagggttttctcgtgaaaaagtttgctctcttcttctccgcggcggccgttctgtgcatcctgaccggcctcactgcataccaccgctcatttcctctggacgcggacctcaatgggctggaaccggctgcgctccaatggttcaaccggggcaggtccgttccctgcgaggcggaccagttggagctgtaccagcctgtgaccgtggggcgtctcacctattatcctctggttctggatggacggttgggatacctgtgtctctcgagaggattcaccgggcggtataaattcgaccactccggtcgcgggaccggctccttccgcaacggagtggtggagtccgacggggagcagatgctgctcttcgaggggcggaacggcgacggccgcatcgcccgggcggtcttttcactggagggcggtgggccttatgcgctggacattccggcctctcccgtctttctggtgagcacctcagtggatgataccgtctccacaggtcctatcagcatagaggagattgtcttttatgacagccaggggcgggatatcaccaagtcgtttgacctcagcggaggcgccatccagtaagcgcccccaccgaaaaccaagcggccgtctgccgctgaaaggaagtcatcacaatggatgtgatcttaggcattgacatcggcggctccaccaccaaaatcgtgggtctgcggacggacggcagtgtgatctccatgctgcgggtccgggcggaggatcaggtgaccagcctgtatggcgcccttggcaactatctcaccagcaaccggctctccctgcgggatgtgcggcgggtagtgctcaccggcgtgggcgcctcttatgtggagggcgacatctacggtctgcccacctgtaaagtgggcgagttctccgccagcggcaccggagccctggccctgtcgggccagtcctccgccgtggtggtcagcatgggcaccggcaccgctttcctctgggcgtcccccgacggcatccgccacctgtgcggcagcggcatcggcggcggcactctgggcgggctctgccacaagctggtgggaatggagcgcttcggccagatcaaaaagctggcggagagcggcaatctggaccatgtagacctgaccatgaaggacatcacggtccactccgctcccactctggacccggatatgactgccgccaacttcggcgatctggcggaggacgccactcctgcggacctggcggccggcgtggtcaatctggtgctccaggccatcggcaccatgacggtgctggcctgccagtgctgtgactccaagactgtggtgctgaccgggtccatgaccaccctgccccaggcggtcacgaatttccagctgtttgaaaagctgtacggcatccactatatcattcccgaaaacgccacgtttgccaccgccatcggcgcgggactgtacagcctgcagaaaaagccggaggcctgattgtgccatgacggaaaattggtccctgtatcatccggagatcccggaatttctccgccgtctggcagagacgccgcccatggcccggctgcggcaggtgggcatgaactgcgggtgcgagtacacgtccttcccccactttgccgggtgggccccctactcccggtttgaccacagcgtgggcgtggggctgatcgtgtggcacttcaccggcgatctccgccaaagcgcggcgggactgctccacgatgcggccacacccgcctttgcccatgtggtggattttctccacggggaccacctgcatcaggagtccaccgaggcacggacggcggaactcatcgagacctcgccggagcttcaggcgctgctgaaagaatacggcctcaccacggaagacgtggcggattaccaccgctatcccatcgcggacaatgactcccctcagctctccgccgaccgtctggagtacacgctgggggacctgcggtgctacggcttcgccggggcggacgccctccgtgtattctacgaagatctcaccgtctggcgggacgagtccggccggccggagctggccttccgcacgcgggagaccgcctgcgccttcacagaggcatcgctccagaccgcccaggtctatgtggcggacgaggaccgcttcgccatgcaggccctggcggacctgctgcgcgatgccgtgaaccggcaggtcttgacagaggatgacctgtatcggacggagtcttttgtcatccaaaagctggaggcagatccggccagcgcccgccggtggcgccggttccggcgcttctgccgggtggagcggagcgcggaaaggccggagaacggactctggttccggattcccgccaagctgcggtacattgatccgctggtggcaggccttggccgcgtctctcgcttggacgccggggtgcggcaggcccaggaggccttcctggccacggactttgcctgctggatcggtgttccggaggaaaccgccggagagaatgattgaaagattgggagaaagagacatggattacagagaaaaagccgtccggtgtgtgcgggagaccgtcctgcctgtccaggcggcgcagttccgggcgtgcggctgcgacctggacgcccagtaccgaaaatacggggacacggagagcttttttgccaaggttctccagcccgggcgcctctatgaggtgggttatcccaaatgcgtctgccctgaggtgctgggggagagacggccgacgccgcccactgcgaatgttcccggcagagtgtgctgtatattctggaacagctgctgcccgaaagacacatcacggtccggaccgtggagacggtgctgggcggcgggacctgctgccggttcgccgttacagtggagtagcagcggaaaatgcaaacaggagcccggtgctgtgcaccgggctcctgcgctcacatatagggattattcctcgtcctggggcttgtcctcgtcctccaggccgttcagatcgaactccagcttctcgccgcagttggggcagatgacctcgccgtcctccaagacggactcgtcgaagtagatggtctcctcgcaggtggggcaggtggtggcgtagcagtcctcgtcctcctccggctcctcatactcgtatacatcctcttcgtcctcgtcatcctcgccgaagacggcgtcctccacatcctccaggtcatcgctgacagcgtccaggccgtcgtacagctcctcctggtccgccttcatatccgcgatctccagggcgatgtcgtccagcacgtcgatgatggcggcaagcagcttgccctccttcttctcggtgtccagttccatgccttcagccaggcccttcagatacgcgaccttctccgtaatctccataacagcagctcctttcctttacaaacagcgttgcagtcattctcaggaacaaaagggggaatacgcttcccccctttgcctcacttactccttgctgcggccgatatactcgccggtgcgggtgtcgatctggatcttgtcgcccgtgttgatgaacagaggcaccttcacctcagcaccggtctccagcgtcgcgggcttggtcacgttggtggcggtgtcgccccgcaggccgggctcggtctccgtgacctccaggtccatgaagttgggcacttccacggtgaacacgctgcccttgtagctcaccagcttgcagacggtgttctccttcacgaagcggaaggcgtcgcccagcacgtcccggttcagcgggaccatgtcgtaggtctcgggatccataaagtagtacaggtcgccgtcgttgtagctatactcggcatccttgcgctccacagtggcctgctcgaacttggcggtggggttgaaggactcctcgcggatggcgccggtcatcacgttcttgtacttggtgcgcacgaaagccgcgcccttgccgggcttcacgtgctggaactccaccacggtgcaaacgctcccgtccttctcaaaagtgacaccattgcggaaatcgccggcagtaatcgttggcataaatgatcctcctctgaaatctcaagaaaagctgaccagccggccgcctctctatctctacaaaaattcctctgctattttatcctatgttgtccggtaatgcaagtatttttcaggactttttttccattttgcggcggcagatagccttaaacggggcctggagagcgtggagcaccttctgccatgccgtcacggcgccgcccaccggctccaccatcagaggcaggactccggcccggttggcggccagcatatccgtcagcagcttgtcccccagcatggcggtgcagacccggtccgccccagcccgtgccatggcggcctccaggcccctgggactgggctttcctgcacggccctgataaggcacccccaggtccgcgcagaactccgtcacccggctgccggagcggttgttggagacgatcatgaaaccgatccccgcattgcggagggcggcgatccagtcccgcagggactgatccggccgacgggtcttcttggcggccagggtgaagtccaggtcgctgagcagcagggtgatcccctgctgccgcagccagtccggcgtgatctcgctgtaatactggaacacccagcggggcgtcagggaaaacggcataagcggctccttctctgcatagtctccttttagtataccagtcccaacgggattccacaagggggagttcattttgcagatctatctggccgtgacgccggccgaggcccaggaggcctcccgcttccgctgttccctggcccatgtggcctactgtatcgggccggactccacgctcctgcggcagaacctgctgctccagacccggggcgggctattgtccgtcacagaccggggcgcgccctttatcgccagcccggagcggctgtcggccgccgcgctgcgggagtgcgggcggcggagctacggcggcgtactgctggatttcgagcagcctcctgcgccggaccggctggcctttgcggagacgctggcccggcgcctgtcgccccgccccgtttatgtgccggagtcctacgccgcggcgtcaggcgccattcccctgatctgcaccgccatctccggcgggaactttgtccagcgcctgcaggaggccgctgccggacgggacagggcaggcggtctggccctggatgtccagcggctgcggatggacttcaccctcccggctcaaagcggcgaaggccgccctctcagcggccgggaactccaggacctgctggaccgggagtccccctccgttttcttctcccaggacctgtgcgcccggtatttcacctatgcccgggacggcgagacgcatttcgtcctcttcgacgacgcggacaccctttcccagaagctgcggaccggcgggaacatgggcttcgccgccgccttcctgatgtatccggaggtgcaggatctgctgcccaagctgtttcccgggcggaggacataaaaagtgctgtacctttcggcacagcacttttccttgacagatcaataatagcgcttcttgttcttgcgagcggcctcagacttcttgcggcgcttgacgctggggctctcataatgctctctcttccgcacttccgcgatgacgccggccttggcgcagctgcgcttgaaacgcttcagcgcgctgtcgatggactcgccgtccttcacatggatctcagacatctatatttccctccctccgaggtatccggcttaatccaggatactttaagggccataatctatggctttaacataagtattatacaaaccttccgggccgttgtcaagagattttccggaaaatcagcatttctcccgggagatcagtccgccgctctccggtacacgatgggcacatcgtacccgaacgtccgctttccgttcacctccatggtctccgccacctccagggactcctgagagaatcgctcatacagggtgaacttcagcaccggggagaacatgctgacgctgcccccctcccacacgccgtcgtgcagcgtatagagggcaggcgtgaatttctcggagatctccagatcctcccatttcaggggcggcagcgtctcataggtggccgcgccgccgtccgccgccttgggcagctgataggatgtcagcttcaccgcctccccctcctccgtaaagaggaacagatggggtgaggcgtgggtctttccctccgtggtgtagtagctctcctccagcacaaatgctcccgcaaaatccgcggggaggccgtcaatcttgtcgttgcacacggtgttgacatgctctgccagcggcagggcggggctgccgctccgccgcagctcctccagctgccgggtattgtcaaacctgccgcacagcaggcgcaggaattcatccagacggctcataggttctcctttctcaggcagggcctgaagcgcaggccggacgggatttcccgtccggccttttggtgtgattgggatgaactgggatgctcccaccagatgcatcggccggttcccggtccagcggggctcccgcatcggaatgcagccggacaggcacaggccgtccgccccaaggttgttgcctccggcaaaaacgcttgtacgcaccgctgggcgcagtcttatttcgcgggcttgacgatcaggttcaccagccggttcttcaccaggatggtcttgatgatctgcatcccttcggtggccttccggaccttctccaccgccagggcggcatccaccacggccttctcctcactgtcggttggcatggagatggtgcccttcagcttgccgtttacctggacggccagctccactgtggaggccacggtcttgctctcatccgccacgggccactccgcctggcagcacatcttgcccgtctgggcggcgaagcccaggttctcccacagctcctcggtgatgtggggggcgaaggggttcagcagcaggagcagatacttcaggtcgccccgggtgcagccgttggcgttcagctcgttcaccatggtcatcatggcggcgatggcggtgttcatcttcagactgtccacatcctctgtgaccttcttgatggtcttgtggatgacggcctcgttggcgggggtcacatcatagctgtcggaggcgctctccgccagattccacacccggtccaggaaccgcttggagcccttcaccgcgtcgttggaccaggttgcggccttctcaaagtcgccgatgaacatgatatagaggcgcatggtgtcggcgccgtactggtccacgatgtcgttggggttcaccacgttgccccgggacttggacatcttctcgccgccctcgcccaggatcatgccgtggcttgtgcgcttggcatagggctccttggtgggcacggcgccgatgtcatacaggaacttgtgccagaaccgggagtacagcagatgcagggtggtgtgctccatgccgccgttgtaccagtccacgggagaccagtagtccaaggcctccttggaggcgaatgccttgtcgttgtggggatccatataccgcaggaagtaccagctggagccagcccactggggcatggtgtcggtctcccgctgggcggggccgccgcacttggggcaggtggtgttcacccagtcagtcatcttgctgagggggctctcgccggtgtcggtgacctcataggagtccacctccggcagcagcaggggcagctgctcctccggcagggggacccagccgcacttggggcagttcaccagggggatgggctcgccccaataacgctggcggctgaacacccagtcccggagcttgaagttggtcttgggacggccgatgccctgctccgtcacccacttcttcatggtgggaattgcctctttcacggtgaggccgtccaggaagccggagttcaccatgatgccggtgtcgtccttcagggtgaaggcctccttggtgatgtctccgccctggaccacctccacgatgggcaggccgaacttggtggcgaactcccagtcacgctggtcgtggcccggcacgcccatgacgatgccggtgccgtagcccatcagcacgtagtcggagacgaacaggggcacgtgcttgccgctggcggggttgacggcctcgatgccctccagccggacgccggtcttctccttgttcagctcgccccgctcaaagtcggacttgcgggcggcctcctcgatataggcggccacagcatcccagttctggatctggtccttccactgctggagatagggatgctccggggagatgaccatataggtcacgccgaacagcgtgtcgcaccgggtagtgtagaccgtcagcttgtcgccgttggtggcggtgaagtccacctccgtgccctcggaccggccgatccaattcttctgctggatcttcacccgctcgatgaagtccaggtcgtccaggtcgtcgatgagccggtcggcgtacttggtgatggccagcatccactggctcttctccttgcggatgacctggccgccgcagcgttcgcacacaccgtccacgacctcctcattggccaggacgatcttgcagctggtgcaccagttgacgggcatggaagccttgtaggccagccccttcttgaacatctgcaggaagatccactgggtccacttgtagtagctggggtcggtggtgttcacctcccggtcccagtcgaaggagtagcccagcatgtggagctgcttgcggaagttctcgatgttgtcgtgggtcaccttggcggggtggatgtggtgctgaacggcgtagttctctgtgggcaggccgaaggcgtcatagccgatggggaacaggacgttgtagccctgcatccgcttcttccggcagatgatgtccatggcggtgaagggccgtgcgtggcccacgtggagcccctggccggagggataggggaactcgatcaggccgaagaacttctcccgagtcttgtcccccgtgacggcggtgaagggcttctcctccagccacttctgctgccactttttctcaatgctggcaaaatcgtatttcatatccttctcctcattcctgtgaatggatttctctgttcgatttatttttgccgcggcgcgcccccgggcggcctctcttgcttctacggggcaattcaccttctgtacgtggcaaaaatactttgacccaaccgccttgggttgtgtcgccagtgactgatgccgctggtgaaggcactctgctgcgcagccgttggcggctctgccgcctgacggatgcggtgtgcccctgcgggcaaggagatgtcaatcccctctttaagctgtaaaagcgcccccgaccttacggtcaggggcgtaaaagctacgcggtaccaccctggtttcgccagccgttgccggatggcgctcaacggcccggagggcctcggccagtaacggggcctgccgtcccaccctactatgtccgttcaggcgggagactccgggaacagtcatccgcgaaggtcccccaccggctcgcagcaaccgccggctctctgaaggcgggacatttcgcctttcttcccatcaatgtcgttaacgggtctattttatgtggctttgcgcgttttgtcaagaggtaagcgggaaaagcgctttacaatccagtcgacatcttgtttttgcccgtcctgctctgtataatggggaaaatccaacgtatggcagcagaaaaaactctggcaattttggggggaggcgaaaccgtgaagggcaccctgataaacacgcccacattggaaaccgggcgtttgatcttgaggaaattcacagagcgcgatctggaatggctgtttctgattctccatgacaaggaagtcaatcaattcctgccctggtatccgatagacagcatagaagaagccaagaaattctatgaagaaagatacgcttcaaaatatgtccagccgcaggcatacgcttacgcgatctgcttgaaaacggacgatcatcccatcggctacataaaagtggatatggaggaacatcacgatttcggatatgggcttcgcagggaattctggcatcagggacttgtcacagaagcgggcaaagcggtgatcgcccaagtgaaaaaggacggcctgccttatatcacagcaacgcatgaccgaaacaacccaagaagcggcggcgttatgcggaacgttggaatgaagtaccaatattcttacgaagaacagtggcagcccaagaattttctggttacatttcggatgtaccaactgaatcttgatgggaatacagatcgggtttacaaaaaatattgggaccaatctgctgcccattttatagaaccgaacgtgtgaacagatggatattggagaaaagttgggcgccgaggcagccggacttgttaaaaccgaagtgcttggtgcatggacctgcctcacaggaagcaggcccattttcatacaggcgcgcccaatgcgccctcacacttcgcagggaaggcttttcgccccctgacttatatcgctgccccttgattccgattgtttcatactcccccgccggtcgcctgatgcagcagctcctccgctggcacaccgaagagcttcgccagggccagcaggttggaggtgctggggtccgccgtgccggtctcccatttgctgaccgcctgccggctgacccccagggcctccgccacgaactcctgggtcatctggcagcgcatccggtgggccttgaggacctctcccaaggtgcggcgggtctccgctttttccctgcgggcctccccgccccgcaggtacttccgcagggcccggatcagcaggatcagcagataaatgagccctgcccagatggccagaaacaggagcagcagcgggagcatgataatggaactgaatgccattgcagttgcctccttttgttttggtggtctcagcatacccggggcgggcggttgcgtccaccagctatcgcgcaactctgggttgataagcagaaaaaagctccggcggtcagcgccgtcggagctgatgtttccccttttcaccggacacggcgccccacaaaatcttcgttttgcgtggcaccacattggactcaaatgggcaggcagagcctgcccatttcatatttttgcctgcggcaaaacgcttggacacgccacttggcgcgaagggcgatcaattctccgtcagcacaccggagagatccaccggcttgccgtcgtgccaaagccgctccagcgaatagaactcccgggcctcggcggagaacacgtggaccaccacacagccgtagtccagcaggacccaggtgccgtcccggtagccctcccggcggagaggatcctcccccgcctgctccttcatggccttctccactgcgccgcacagggcgttgatctgggtgttggaattgccggtggcaatgacgaaatagtccgccagggtggtctgctccgtgatctcgatggcggcgatgtcgccgccctttttctcgtccagggctttggccgcagtcagggccatctctttgggtgtcatggactcatcctttctgatcgtttgaatctgcggcacacctgccgctcaggttacaataataaacccgtcatccggggccgcggttccgccgtcggacgtaccggggtctacaggaggcgccgtctcaccatcagacggctgggaatccggcgactccggggcggttccgccgctctcacctgccgccgggtctccgctgccgcccgggagctggccgatcacctgtcctgtaccggggtccaggatctgcccggtgccgggatcgatgatgccgccggtctccgggtcgatcaggtctcccgtgtccggatcgatgctccccgtaccgggctccgtggctccgccgggatccgtggtctctccgtcgccgggcgtcccggccgccccgccggtctccggcgctccggcatcagggccggtccctgtgccggtctccccctccgggggcgtctcctcctccggctcctggggcgtccactgggcctgccagtaggaccggggatgggtggcgttgctgtcttccacatgaccggtggaggagctgacggagccgtcgctgttcacggtcatcatatccagatcgctgcgggtaaatacctcggcgtaggggctcaatttggtgttcaccagctccagcagttcattgggatagggggtcacataagaggcctccgagtattcgccgttcgccttgctgatagacgcgctgtaagcataagcactgctgttacccggcatggtgacgaattccacgttctccgccttcaggccacctaaaaatgcggcctgcgcaaaccagaggatgttttgaaacgtcaggtttgtctccacattgtcctgaaatacctgaatgaactgccggactttcggcacattttccactttcagcagttgctcgaccatcgccttcaaaaacgcctgctgggtcttgatgcggcccacgtctccctccgggtatcccagcgtcacgccgttcttgcggttgtcatggcggtaacggaggacttccatggcgtcctcgcccgtgagcaggcgatagcctttctcctgatggatatggaggttttgaagaggatcatcatagttcatattccggggcacatcgaaccagacgccgcccatggcgtccacgatttcacccacggcctcccactccacaatcacctgataatccggctcaaagcccaccagctgggagatctccttatacagggcctggataccccggtctccgccgccataggtattatagacagagttgatcttcttgatatcccaggagacattcaccatagtgtcccggggaatggacatcaccgtggccttctggttggtcacgtcgtagctggccagcagcatcgtgtccgtattgccgccgccccccgtgtcccggcccaggatcagaactgtgtagtagtcctgactcttccgctccccgtcgctgcgggggcgggtcccctcgccccagtcgatctcctccaccggatcggtgggttcttccgtctcctggggctctgtcttgccggtgttgaggtccggccggacgaacaggctctgccaggccagaactcccgccagggccacagccagaactgcggctgcggcaatcagccccttctgccccctggtcagtccggaccgtctctttgggggacgtccttttccatccatctggtccgccatggtgccaccccttttccgtcattcagctcacgatgataaagccgtcatccggagcctcttctgcggcagcatcgccgcctccatctccggtgccggaggtctggctgtctccagtgcccgaatcggtcgttcctccgcctgcgtcaggcgtgccgccgtccggagtcccgcttgtgcccgtacccggatcggtggtcccgtcggtgccggtgccggtggttccttctccggtgtcaggtcctgtggtcccgccgccggtgccgggatctgtcccgccgtcgggcgttgtccctgttccgggatccgtcgtgccagagcccgggtctgtggtcccgcccgtccccgggtccgtggttccgccatccggcgtcaccggcaggccggtgtccggatcgatgggattaccgttctcatccaccgtgggcgtctcctcctccggcttgctgggcgtggtaggcttcaccggcggccgggccgcccggctgtcttccacatggccggtggacgagctgatgctgccgtcagagttgacggacataatgtccaagtcgctgagggtgaatacctccgtataaggactcagcttggtgttcaccagctccagcagctcattcgcgctgggcaccacgtaggattgatagttgtgataggtgcggctccagcaggatgcggtccggttgggcatggtgacaaactccacgttctccatgctcagcccacccagaatcgcctgctgggcaaaccataggatattctggaagctcaggtctgtctccacattgttctggaacacctggatgaactggttgatctttgtgacgttcttgatctgcagcagctggtccaccatggcggtcagaaacgcctgctgggtcttgatgcggcccagatcgccgtccggatagccgtagcgcatgtcgttgtcgtggcggtagcggagcacctgcatggcgtcgtcccccgtgagcaggcggtagcccttctcctggtggatgtgaaggtcctgataaggatcgtcgtagttcatgttccgtggcacgtcgaaccagacgccgcccatggcgtccacgatctggcccacggcgtcccactccacaaccacctgatagtccggctcaaagcccaccagctgggcgatttccttgtagagatactggatcccccggtctccgccgccatagtagttatacacggagttgatgcgcttgatatcccaggagacattcaccatggtatcccggggaatagacatcaccgtggccttctggttggtcacgtcgtagctggccagcagcatcgtgtccgtgttgccgccgccccccgtgtcccggcccaggatcaggaccgtgtaatagtcctgactcttccgttccccgtcgctgcgggggcgggtcccttcgccccagtcgatctcctcttcctgggtcccgctgtccgcatccgcgttcttctccggcagatccgggcgaacgaacaggctctggcaggccaccaccgcgatcagcacgatggccagtaccacggctaccgcgatcagcagcttctgctgccgcgtcaggcggctcggtttcttcggcttcttgggtctgctctttttcggcgtcccgcccgccggatgctttccgttttctctatccactgtctctctatcctttcaatgcgtcccgcgcctcaatggtggcgtggtgcacagggtttcccatttcggtcatctcttcgatggtcatctccaggcccatcagcaggccctcgtccaggtctttataacacacagcgcggagtttgtctacccccggaaaattccgggagggctcgatataatccgccagatagatcactttttccagcagggtcatgtgggcatggcccgtggtgtgccaccagatggcgttgtagatttcatcgtccacaccgaacacgtcccgggcgatggccgcgccggtcttggcgtggagaagcttcagggccttctgctccagctcgtccagctggatgccgtaccggccgcacagttccagctgctcctccatgttcagcttttttgtgcagtcgtgcagcagtgccgctacccgggccttctccacatcggcgccgtaccgctccgccagacggatggcctcctgctccgtgcccagcacgtgggggatgcgcttgtttttcaaataactcagagctatcggccgcagctcccgcaggggcaggcgcttcaaatccgcccgggtgccgtacagtccctcccgcaggatatagccgtacaccgccggaggcaggagattcacgccctctcccttcgccagcatggttcgcaggtctgtggaggacacatccaccacgccggggatggtgagggtgaagatccgggcctggggatatgtccggtacagatagtcccgctgaacggagaacagctcctccgtgtccgcctccgttcggccgaaggtggcgatccccgccagggacagaatcttctccgcttcgtgccaggtctggatggtgaggaacatgtccgtgcccatcagcagccacagctcgtcctccgggtaccgctccttcagctgggccagggtgtcggaggtatagctccgccccgtccgcttcagctccagatccagtacctggacccggtcccccaggcccagctgctcccccgccaggcgggtcatctcaagccgctgttccggagtggggctgcccgctggcagcgccttgtggggtggctcccggtccgggaccagcagcagcaggtccagcttcagcagctcgaataccgcccgggccgcggtcacatggcccaggtggggcgggttgaacgtcccgccgtaaacgccgatcttcatacgcgattcctctttatggttcagatttttccgccggaagctccaactccatctcgtcatccgtggcggtgaagccataccgctgatacagcgggcggcccatggcggtggtgtggagagaaaccgtcaaacagccccgctcacaggccgctgccgtgaggagatccagcatccgccatgcgatcccccggcctcggaaggcaggatccgtccagatgttcataatatggccggacagacccgcgggattgtgataggagggcatctcccggcggaggtccaggccgccggtggcggccagccgctctcccgccagcgccagaagcgcaatgtggctgccggacgccagggcctggcggtagtaatcccggaccgcatccggcaggccatgcggcagcgccgccgtctccgaaaggtgccggtaggtccggatggcccggaggcggctctccgtcaagagctccagatccccgatcccggcagtgcggaacgtcagttccatcgggcgccttcccgggtcactgggggcgcttctttgccggcttcaccagctggatgcgcttctccctgggcttggagtggctctcccggtacagcacgaacttcgtgccgatgacctgcaccacctcgctgcgggtggccttggccagctcctccgcggcggtgcgggcgtcgtagtcgatattgttgtccagcacccggcccttgataagctcccgggcctccagtgcgtcatccgcctgcttgatgaggtttgccccgataccgtccttgcccacctgcaggatcgtgtcgatgctgtttgccaggccccgcagctgggcccgctgtttgcttgtcagttccatgtatactcctttattccgggaaatggccccggtcttttttatttttcgtcatgccaggtagactgccgcagcttctccatagactcctaggcaatccactcttctgtatagccgcagctgcggcagacatacctctgaatttttgcatttacaaaaaaccgatgggaaaagaattgtacagccccggctccactgccagcaggtccgcgctgccgcatttggggcagcgtccggtcgttttcaccgcagttccctcctcatcaaaggtagacggttattttttcaaataagttgccagtttctccgaaaatgcccgcagagcttttcctctatgggagatggcgcccttctcctctgccgtcagctggccgaaggtcctgcccttctccggcaccaggaacaccgggtcgtagccaaatcccgccgtccccatgggggcaaaggcgatggcaccgtcgcaccggccctccgccgtcagctcgtccccgccgggaaaggcgcaggcgatggcgcaggcgaagtgggccgcccgggtagtctgtccccgcatgttctgcagcaacagggtataccgcccccggtcgtccagctcctccccgccgtaacgggcggaatacacgccgggtcctccgttcagggcgtccacacagagaccggagtcgtccgcgatggcgggcagcccgctggccgcgcagatggccttggccttcagcatggcgttttccacaaaggtggtgccggtctcctccacgtctacggagattcccacgtctgcggggctcaccacttccacccccagtccggagaggatatccgccatctccttcagcttgccggggttatgggtcgccaacacgaatttcataccgtctcctccttttccgccgcacggtccagacgcttgttccggatggtcagcaccaggtcgatggtgaccatggtgatatccaggatgtaaaaagccgccacataggtgacatttccactgatgaacttccccgccaagccgcagagatagcccacgatgatgcacacctcaaaccataggctcttgccctttgcagtacgggagcgcacggactttgtgatgttgaagggctaggacaggccgaagcagatcagcataatcatctcgaatacctgcgccacggaaaccatctccttctttcaatttgtggttttatcgcttcaaaatctcccgctggagcttcagcagctcccggttgcccttggcgcacaagcgcaccagctcctgttgctcctggggtgtgaaggcccggccctcgccggtgccctggagctcgatgatctcccccagctcattcatcacacagttcaggtccacctgggcacgactgtcctcgctgtactgcaaatccagcataagggtctccccgacgattcccgcagacaccccggtgacgaaatgccggatgggattggaggccagcacgccctcctccaccagcttccggcaggccagggccagcgccacaaagccgccggtgacggatgcggtgcgggttccgccgtcgccctggagcacgtcgcagtcgatggtgatggtatgctcccccagcttcgccaggtccacggcggcccggagggaacggcccaccagccgctggatctctgcgctgcggggcgagagcttcagcttggcgatgtcccgcttgctgcgctcccggttggcccggggcagcatggagtactccgctgtcacccagccggtgccctccggcacatggggcggcacccggtcctccacgctggcgcagcagagaaccatggtgttgccgcactggatgagacagctgccctccgcgaattttacgaaatcaggggtgattttgatcgggcgcagctcgtcaaacgcccgtccgtcttgtctggtcatggtatgcgctccttttcattttccccgcagagaggactggatcgccgcgaacgcacggtcatagtcatccctgtgaacatagatggtgtaggtcaggacgctgtcctgtacagcagtcggagcggccccctgctgcggcgggcagccgcggcgtataggccccgggtcctggtgccgctggagagcccggcatctgaaagcgccccgcggatcagaaagtacatctgctgcgacgacacagagatcagttttctccgattccaaatggtgatccttgtctctctgctgccgctcaaataatggcctccacatattccttcgcgtcgaagggcttcaggtcgtccaccccctcgcccacaccggccagcttcaccggtacgcccagctccttggcgatggcgatgacgatgccgcccttggccgtgccatccagcttcgtcagcacgatgccggtgagtcctgcggcctccttgaactggcgggcctggatcaggccgttttgtccggtggtggcatccagcaccagcagcgtctcccgtgcggcgccggggcattcccggtcgatgatcttggagagcttggcgagctccgccatcaggttagccttgttgtggaggcggccggcagtgtcgcacagcaccacatccacccctcttgccttggcagcctgcagggcgtcgaacagcaccgcgccggggtcagccccctcgtgctggcgcacaagttcgcagccggcccgctccgcccagatctgcagttggtccgccgctgcggcccggaaggtgtccgccgcgcagaagaggacccgcttgccctcgcttttcagctgatagcccagtttgccgatggacgtggtcttgcctacgccgttgacgccgatgaacagcaccacagcaggccgggtcgagagatccagctccgtgccgcccacgtccatctcctccgccagaatgtcccggagggcggccttgaccgcctcctggtcctggagcttctccttccggaccctcgtgcggagtttttccacggcgtccagcgccgtgtccatgcccaggtccgccaggatcagcgtctcctccaactcctcgaaaaaggcctcgtccgcctcggagaagccggagaagagatttgtggtgatctttttcagcttgtcaaaaaagcccatggtatcctcccaaatcggaaatcagcgccggagaggtttatcccagtccaacctgtttccgcagtatttgcagtattcgccgggaaaaagcggcagatgtgccccgcactccgggcagcggatcacgaacaactggatcgcaaggcccgccgccagcagcagtcccccgatcacgcccgcctccggtacaaatacggtcctgctgaggaactgcagaacaaatcccgggactagcaggataacgctcaggatcgtccatctgcgcagtgtcatgagatcgtcctcccaatcgcttcaaatcctcttgcgccgggtcgccgttcactccactttcttgccgcagtatgggcaggtcttatccggtcggagctcccgaacggactttccgcagtgggggcagcgcagcagccaccacactagccccagatccaaaaggaaaatcagcagccctgcataggtcatccatccgccccggaagataaggaggcctgccagcaggcccacccagatgatcagtatctgtttatgcttgcgcttcatggattccgctccttatttgatcttcagctctttcgccatgtcattcagattgatggtcaggatcttgctcacgccctgctcctgcatggtgacgccatagaggacgtcggcctcctccatggttccccggcggtgggtgatgacgatgaactgagtccggcctgccagcgtccgcatatagcgggcgtagcgggtgacgttggcgtcatccagagccgcctcgatctcgtccatcacgcagaagggcgttggatggactttcagaatggagaaatacagcgcgatggccacaaaggccttctcgccgccggacagcagggagatggtcttgagggtctttcccggcggctgggccttgatctcgatgccgcagcccaggatgtcctcctcgtcctccagttccaatctggccgtccctcccccgaagagctcctggaaggtggtctggaagctctcggacagcagcttgaactgctcggcgaaaatcttggtcatctcctccgtgatctcgccgatgatgttctgcagctcgcccttggccttctccacatcgttgcgctggtccgtcaggtaggtgtagcgggtgttcacccgctggaactcgtcgatggccccgatgtttggggtgcccagggcggtgatgtcccgcttcagctccccgatccgccggttggccttgggcacgctctccagctcgatccgctgtgcctgggcgtcggagtgggagagttcgtagtgttcccacagccggtccaggatctgcttttcctccatggcggaggtggcccgcttctggtccagcttggccaccgcccgctccaggttcagcaggttctcgttcatctcctggcccgcccggttcttggcagtccgctccgcctccagggcgttcttctcctctgtgatggcggccagccgctgccggaaggccgcgccccggcccgccagctcctccagcgccgtctgcaatccggcgatctcttcctccgcggcggcgatgtttcggcggtaggtctccgccatctgttccttctgctcccggtcaccagagagatccgcgcacagcgcccgcaggtccgcggcgctgcggactgtggcctcccgctcggccgccagggcagccagatcgctctttctgccgctgatctcctcggccagggcaccggatttctccagcagctccgattggccggaaagagccgcctccgcctgggcccgcgcgtccgcggcggcggattcctgtcggttgatctccacctgggcggcggcagaccgggcgtcgttgtccgtcagccgtccggccagactctccagctcgccgacgaggttctccacgctctcctccagggagcgcagcaggagatcatattgtcccctgatgccctccagccgcaggacctcgtcctctgcgtggcggcgctgggcctccgcggtctccagctcgtattgggcggcggccagttcccgggcggtatcctcctccgcctgctttgcctccgccagctttgcctgcatggcagcggtccgggcggtgagctgctccaactccgcggaccggctcagtacaccggcggaccggctggtgctgccgccggtcatggagccgccccggttaatgacttggccgtccagcgtcacgatccggaaggcgttgcggtacttccgggccatggcgatgccgcagtccaggtcctccaccaccacagtgcggcccagcaggttgtaaacaatattccggtacgccgggtcaaatgtcaccagccgggaccccaggcccacaaaaccaaattccttctccacgcctttttcatggagctcgtcaccccggatggcggtgaggggcaggaacgtggcccgtccggcgtcccgctgcttcaggtagctgatggcggccttggcatcctcctcccggtccaccacaatgttctgcagtcccgcccccagggcgatctcgatggccaaggagtacctgccatcggtcttcaccagattggccaccgggccatggatgccctgcaggccgctctgtgcgcggcacacgaacttgaccgccttggagaagccctcgtactccttctccatctctgtcagcaggcggcggcggttttccagcgcccccgtgtccatggtcagctggacccgccgctccgcggcggcagcggccttcttcttccgttcctccatccgcaggctgtggccggcgatgatgttggcggcggcctccgcctcgtccctggcatcctccagggcgcggcggttctcccgcgcctcctgccgggcggactgaagctgctcctccgcggcggccctgtctcgctctgcggcctcccgccgctcctggatctgcttcttctccgcggcggcggcggccagttccgcccgcgcgtccgcggcggcggccatggcgagggcctcctgtgcccgcaggcgctccgcctcgttctgggcgccgccggcctgttccgccatggtctgggcggtctccagcagggcggccagcgcaccgttcagctccccgatccggcggtcgatctccgccacccgggcttcctgctcctccgcctgcttcgcaaggccgccggaacggctctccgcctctgccagctccgcctccgcccgctggatgttctcccggttgtgggtgacggtgctctccagcacggcggcggcggactccttctccttgatctgctcctccagaacggcggactctgtccggacacgctcagcctccatgtccttctcccgcatccgctcgctgtaccgctccccctcggcatagagggcgtccagagcggcgcgggcctcgtcccgctgggactctgcggcgtgaaagtccgcctccagcttccgggcgcccgccttcagggtgtccaggttctccagccagacggagatctccagaaggcgcagctcatcccggagcaccagatacttcctggccttctccgcctgctcccgcaggggctccacctgaagctccagctcggcgatcttgtcattgatgcggaccagattctcctccgtccgctccagcttccgctccgcctcctccttccggtggcggaatttggaaatgccggcggcctcctcgaagatctcccgccgctccccgctcttggcggagaggatctcatcaatcttgccctggccgatgatggagtagccctcccggcccatgccggtgtccaggaacagctccgtcaagtccttcagccggacagactggcggttgatgtagtattcgctttcgccgctgcggtaatagcggcgggtgacggacacttcgctctcctccatggtggggaagatgtgctccgtgttgtccagcaccagcgtcacctgggcaaagcccacctggctgcgcttctccgtgccgccgaaaatcacgtcctccatcttggcgccacggaggcccttgacgctctgttcccccatcacccaccggatagcgtcggagatgttggacttgccggagccgttgggacccacgatggcggtgatgtcctcgccgaaattcaggaccgtcttgtctggaaaggacttaaacccctggatttccaatgcgcgcagatacaaactctcacctcattcggcctctcagccagatcacatactataactagtatagtatagcaaagccactcccctatttcaaggaaaaatctccaggttcggcggctccagccggagctgggccgttatcctcgaaacagatctcgctttttccattttttcatgttattcttttgaaaaaataacgagtagaggagggagtccgtgcgagaaaaaagcccccggctgatcgtgacgtttcacaccactgccggggccatcgccacagagcagctctgccgccgcctggggctggagggcaaactgatctccgttccccggtgcatcacatccgactgcggcatggcctggtccgcgccgccggagctgcgggagcacctggagacccggctgcaggaggccgggatcgagacagccggtttctatgagctgcccctgtgacgattttcatcccagcgccgaagagagtgaggagtgtatttatgagagaaaagagttggtttcgggaatacggattgatcttggcggcgggcgtggccgtgggcattgccgccctgatccttaccgcctccggcaaccccaagaacatgggcttctgcatcgcctgcttcctgcgggacatcgccggcgccctggggctccacagcgccgccaatgtgcagtacatccggccggagatcatcggcatcgtggtgggggccgcggcggcagctctggctgccagggagttccgggcaaaggccggggcctctcccgcctgccggtttgtgctggggatgttcgtgatgatcggtgctctggtgtttctgggctgccccctgcggatggtcatccggctgggcggcggcgacctgactgccgttgccgggctggtgggcttcatcgccgggatcctggtgggcgtggtatgtttaaagaagggtttctccctgggccgggcctatcccgtccgcatgggcgaggggttcgtcctgtctgggatcctgatggcgctgttggggctgctgctgttggtgcccaccctgctgaagttctctgaggcgggccccggctccatgcgggccttctgggggatctccctggcggccggtctggttgtgggcgtgctggcccagcggagccggctgtgcatggccggcggcatacgggacgctgtgatgctgcgggacttcaagctcctctccggcttcctggccatctggggcacggtcaccattggcaatctggtcctgggatcctacagcctgtccgcactgtcccagcccatcgcccacagccagtacctctggtccgccctgggcatggccctggcgggctggggttccatcctgctgggaggctgccccctgcgacagttgattctggccggtgagggcaacggcgactccgccgtgaccgtcctgggcatgatcgtgggcgccgccgtctcccacaacttcggtctggccggcgcggcggattccgtggcggaggacggcacctatgtggtcggcggcatcggcactgccggcatggcggcggtggccatcggattcgcggtactgctggccatcacggtgacccatttgccgaaaacggaggctgtatcgcgtgattgagcacacaatgtatgaaaatcgtctatcgccctgtcctgacaggcaaccggcgatggcggaaaattttcccattttgcacagggaaaatccttgaatctgtgccgcatatcgcggcgaaaggggaatttgatatggtagatacccgcggatacatttgccccaccccggtgctgatggtgcagaaggccttgaaggatcggcccgccatggtggaagtcctggcggaggccggcgcagcggtggagaacatcacccgcttcgcccactcccagggctatcaggtcagcaagacggcggacggaccggactggaaactgaccctgacgaaataaaagacaggcggggagcccgtaggctccccgcctgccgtttttcctgtcccgcggtttgaggtcaggatgtctcccgctttcctttggcctcctcgatctggcggtagaggcactggagtccgtcagagaggccgcccacctggtcgatgatgcccagggacactgcctcctctccatagaccacactgccaacgtcggcggccatatcgtcctttttcagcatcagggcctggaacttctgagccgtgatctggctgtggctggagacgaaggccacgatccgatcctgaagccgctggaagtagttgtaggtctggggggcggcgatgaccgtgccgctcatgcggaccgggtggatggtcatggcggcgctggggacggcaaagctccgtcgggcagccactgccaaaggcacgccgatggaatggcttcctcccaggacgatggagaccgtaggctttgtcatgccggcgatcagctccgcgatggcaaggcccgcctccacgtcgccgcccacggtattcagcaggaagaggacgccgttcacctcgtcgctctcctccagcttggccagcaggggcagcacatgctcgtacttggtggtcttggcaccgctggcggcggtgttgtggccctcgatctggccgatgatggtcatgcagtacacggagccgtggggcgttttggtcagggcggagccgaagtccacgatctgctgggcgccgtcctttccgctctcgtcattttcctctgtggtgtccgcaggtttggtgcgttctgtcatggtaaaccctccttttccccggtattctctgcaattttatgaaaagtacgcgctggactttctttttgccggttactgtgatatgataaaatatctaaagtatctaatcttctactctggcccttctcaataaggagattcctatgaaacagcattttcaaatcccctgggctcagatcctgattgtttgcgccgctctagttatggcttttggaatggggacctctgttcaggtggagcaagaagcggtggggcaacgggaagccttccgacggagcctgcaaatgctggaccagtacctttgtgccctatctgaggatctgggtgatccggatattcttgccctggaggctcccttggaggatgatcgcattcaggaaaacctagtccgggtgcggcggacctctgttgccctcaaacaggactatgtctccaacgccgggagagagacttccccgcatccccacgtgtatctctatctcttggcactagaggaaacgctattggagagcaattatctggatctggaggcactttctcagatactgactatctgccgttccctgtgggatattgaaactggactttcctacaaggagatcatggcccagctggaggaaaacgtcacctccggggactaccaggacgccttggaactgctggggatcagcgatatgataccaattaccacccaaggaggaacataactttggaacagaacaaacagcgtattgtggtgaaggtgggcacctccaccctcacccataactccggcgcgttggacctttggagcatggaacatctggtgcggaccctggcggatctccagggcatggggcatgaggtgatcctggtgtcctccggtgccatcgctgtgggcaccgccaagctggggctgtccgagcggccgaaggagctgcggatgaagcaggcagccgctgcggtgggccagtgccggatgatgcacatttacgacaaattcttctccgagtacaaccgctccatggcccagatcctgctgacaggagatgatgtggaggacccggagcgggcggagcacctgtccaacaccttctccgccctgctggagatgggggtcatccctgtggtgaacgagaatgactccgtctcctccgccgagatcgagaccggacgccataaggtcctgggcgataacgacaccctctctgccatcgtggcggagctgtgccgggcggatctgctggtactgctcagcgacatcgatgggctgtacgacgcggaccccaagactcacccggaggcaaagctcctacaccaggtgacggagctgacgccggagatcctggagatggccggcggcgccggcagctggcggggcaccggcggcatggccaccaagctctccgctgcccgcattgccatggaggccgggtgcgatatggtcatcaccaacggcagacggatggaagacctgtatggcatcgcggagggaaaggacattggaacgcgatttgtatcggggaaaactaggaattgatggattgcacccccagcggaatgatttgaaattcgtccggatccgccggacccctaaatttccaactcctaattcctctttcaagaaaggtgtgacgatatgacagcattacagcagcagggacaggcggcaaaggccgccacctacgttctggccaccgccgggacggccaggaaaaacgcggcgctgaatgccattgcggacgttctgacagagcggcagacagagtggctctccgccaacgcagaggacgtggccgccgcgaaggaggcggggatgcgccccgccatgctggaccggctgaccctgacgccggaacgggtggcaggcatcgtggacggcgtgcggcaggtggctgcccttccggatcccatcggcagagtggacaagatggaaacccggcccaacggccttatcatcggccggcggcgggtgcccctgggggtcatcgccatcatctttgaggcccggcccaacgtcaccgtagacgctgcggcgctgtgcctgaagtccggcaatgtgtgtatcctccgaggcggcaaggaggccatccgctccaaccgctgtgtggcggagctgatgcgtcaggccctgcggtccgtaggtctgccggaggactgcatctccctggtacaggacaccagccacgagaccgccaatgagctgatgcacctggacggctatgtggacgtgctgatcccccggggtggcgccgggctgatccgggccgtggccaaggaggccagcgtaccagtgatccgcaccggcgagggcgtgtgccacatctatatcgacgatgaggcagacctggacatgggtgccagcatcctcttcaatgccaagtgctcccgtccctctgtgtgcaacgccgtggagtgcgtgctggtccaccgggacgtggcggcggacttctggaaaaaggcccttccccttctggatgagaagggcgtggagctgcgggcggacccggaggccctggagatcctgggcacccgggcggtaccggcagaagacagcgactgggacgccgagtacgacgactacatcctggctgtcaagacggcaggcggcatggatgaggccatcgatttcatcaatgcccacggcacccagcactccgaggccatcatcacgaagaactacttcaaggcccagcacttcctggaccacgtggatgcggcggcggtgtacgtcaacgcctccacccggttcacagacggcggcgagttcggtctgggggcggagatcggcatttccacccagaagatgcacgcccggggccccatgggactggaggagctgaccagctgcaagtacgtcatttacggtgaaggacaggtgcggtaagcgcctgccggaagttaaaacgccaagaggggatggtctctatggcggcgatcattctctccctgctggctgcagcgcttctgtcgaccgtgctgctcatccccgccggacacctgaagcaggcgctgggcatcccgtcggcggtctgttccgctgcggcgatggggctgtacctgcagatgcgcactgtctccggcgggcctggtaccggaatagcactggtgcagctgtaccttccctgcgctgtttacggactggtgatcctgggcggcgcggccctgggtccgacaggatggtgctgcggaaaaaagcgaagctgaacatctgattctgatttgaaaaaagaggttgatgcacaatggcgacatttggttttatcggcaccggaaatatgggcggcgccctggcccgggcggcccgcaagcggctgtccggcggagagatcctgttggcgaaccgctccgccaccaaagcggaggccctggcccaggagctggactgccgggctgtggacaatgcggcggtggccgctggggcagattacatcttcctgggcgtgaagccctatatggtggcagggctgatggagaagatcggccccgtgctggcggcgcggaaggaccggttcgtgctggtgtccatggcggcggccctcaccatccccgacctgcgggagcggggctgcggggactggcccctgatccgcatcatgcccaataccccctctgccatcggggagggcgtgatcttctacacctgcgacggcgtcacggcggaggaggaagcggcgttcctggagaacatggcaggcgccgggcggctgctgcccctggacgaccatctgatggacgccggcagcgccgtggccggctgcggaccggcctttgtggacctcttcatcgaggccatggcggacggcggcgtggcctgcggcctcacccgtcccatggcgatggagtgcgccgcccagacgctgatcggcgccgcgcggctgatgctggagacgggccgccatcccggtgcgctgaaggatgcggtctgttcccccggcggcgccaccatccagggcgtccgggcgctggaggccggcgggttccgcagcgcagtgatggaggcggtcatcgccgcctatgagaagagtgcggagatgaagtgaacggtccgtggccggaggcagctgcctccggccacggcattttttgtccgcctgcgggacttgccagcagacggcgagatgtggtatgatcgttctcccatctttttgacaggaggacatgtatggcacgggacatcatcttgaatctggcaatcagcctggatggcttcatttgcgatgaggacggcggcttcgcatggatcagcggccagggagatgtccgggccgacacggcggaccacttcgacttcgacggcttcctggcatcctgcgacaccatcgttatgggtcgaaaggcttatgaggactgccttagttctctgcccgaagcggcggaaaagcgattcctggtggcctcccggacacctcgggcgccggagggcagggttgtctttctctccgccgatgtggtggcggaagttctggcgctgaaggaccggcccggcaagcacatctggctgttcggcggtggagagctggcctccgacttcattcgcgccgacgccgtagaccggtatatcgtcggcatcctgccggtgatccggggcaagggccggcggctgtttcaggaggggattccgccggtggaactccatctggaccgctgcacggtctcagacggcatccctattctggagtacagccggcggggccggtaaggcagatagacaacagccgcagggagcgttccctgcggctgttgttttgtgatttgagaagatctgacttctgtcgctcaggcagcagcgttggcggcccggtacaggaaggtcacaatctggccccgctggcagacggtgtcgggagagaacgtgctgccgtcaccggtgccgagggtgacgccctgggccacggcccagttcaccgcggcggcgtagtccgcgtcagcggccacgtcggtgaaggaagcggcagcagcctcggggctgtcggcggcaacccacatgaagtacaccgccatggcgcgggtgcagcccgcatagggatcaaaggtctcgccttccaccaagccctgctcactgacccactggacggccttgaagaagtacaggctggtgtccgtcacatcggtataggcgggttccgtgctagcaggctccggagaaccggcggcgcgccacagataggtgatgatctgggcacgggtgcagttctggtagggagagaaggtggtggcggtggtgccgttggtgatgccctcgtccacggcccactcaatgccgtcatagtagggagaggtcgccgccacgtcggtgaaggccaggccctggtcaacagtgatgcggccagcgggctgaccgtaggcctcttcggtgacggtgccctttagctcgtcggtgatgtagtccatgaccacctcatccatggagaggcccaggtcatagttgacggaggcagccgcgaacgcatagtaggtgtcgccgccggcggccatgaagtcgttggtggcgatggtgtaggtggcgttggcatcaaagggctcgccgcccacagtctcgatggtgacgcgctggatgctcttggggccgtagtaggtggagccgggatactgctcgccctggtcataggccttggtggtgtccacggtgaactcgatgccgctcacctgggggaagccgccgatagaggtgggcgtgcagtaggtggaagcctccagagcctccagcagctcggcgccggtgactttcacgatggagagggtgttgccgaagggcagcacagtgttgatatccttcttggtgatgtcgccggcggcgatggaggcgcggatgccgccgccgttggtgacagccgcgtccacctcagtgccctcacgctcggcgccccagaccagagcgtcgcagatcaggtcgcccaggttggtctcctcggtacggttaccgggctccttctcgccgttcagggccacttcggtctttgcaaacaccgtgccgtattccttgtcgatctccgcctggatcttggcggcgcgggcagccacatcagcgtccgtggcggtcaggtcggcaacgggggtagtggcggtggtgatggtgccgtcggcatcgatggtgaccacgcccacgctctccagcttggtgccggtagaggtcaccagagtgtcgcccaccttcccggtaccgccagcggcggccttcacgtcctcaagggtggagtgagagtggccgtcgatgaacacgtcgatgccctccaccttctccagcaggtcgatggagcggttgccggtggactcggcatcgatgcccaggtggcccaggcagatgatgtactcgcagccctctgcctccagtgcgtccacctgatcctgcgcgcagtcgaacatcttatcgccggccaggaaggtcacgccctggatcttggcggggtgggccttggttgcggtctccggggtgtccaggccgaacacgccgatcttggtgccgtcgggcgcggtgaagaccacgttgtcctcaaaggccacctggccgttgtacaggacattggcgtccacgatggtgaagtcggcgtccgcctccagatccttgaggttctggtagccgtagtcgaactcatggttgcccatgctggccacgtcgtagccggccaggttcatcagctccacggcggtggcgccctcagacgtgctgacggtgggatcgccctggatgaagtcaccggcgtccatcagcaggacgtaggcgccgcgggcctcgtaggcgtccttcagcgcggccactttggcatagccgctgatggcgccatgcacatcattggtgtgcaggatgacgatgtcgccgtccagatcctgtgccgtctcttccgccgcattggcggtgacggccagggagaacgtcatgaccaccgccagcagcagggacaagactttctttttcattctgttacctcctctgaaagcgcgggagatgacctcccgtggtatggatatagtatagcacatctggaaaaaatggacagaggggacttcgcggatttttcgaaaaaaaccaccagaaatatcccacgttttttgtagaagaagcgcaatttttttctacccgcacttctggcattcccttgcggcgggtgttatactgaaaaaaagcgtctgccggagcttcccggcagcctgccgccgggcggccgcatcgtgccgcagacacacaaggaggtatatttatgaccacattgctcaggggcgggaccatcatcaccggtgccggacagcggcgggccgacctgctgctggacggggagaagatcgcctgggtgggccggggacctcaagccgcagaccgggaggtggatgtctccggctgtttcctcttccccggctttatcgacgcccacacccactttgacctggatgtggcgaacaccaccacggcggatgatttctgcaccggctcccgggcggccctgcggggcggcactactacggtcatcgacttcgcctgccccaacaagggcgagtccctgcaccacggcctggacctgtggcatcagaaggcggacggcaggactttctgcgactacggcttccacatgaccatcgacgactggaacgagtccatccgggcagagctgccggacatgttcgcccagggcatctcttctttcaagatgtatctcacctatcccgccatgatgatcggcgaccgggacatctactgggcactgaaggagctgaagcggctggggggcatcgccggcttccactgcgagaacgccggtgtcattgacggcatgatcgccgagcggaaggccgccggagagctctcccccgcctcccacccccgcacccgaccgccctatctggaggctgaggcagtgagccgcctgctgcggatcgcccaggcagcggacgcgccggtggtcatcgtccacctcaccaaccgggaggccctgctggaggtggaccacgcccggaagcggggccagaccgtgtatgtggagacctgtccccagtacctgctgctggacgagagcgtgtatttcaacgaggactactccgccgctgcccggtatgtgtgcgcgccgcccctgcgggacaaggccgagcaggagcacctgtggaagggcctgcggcggggcgctatccagaccgtgtccacagaccactgctccttcaccctggcccagaaggacatgggccgggaggacttcaccaaaatcccaggcggcctgcccggcgtggagacccggggcgagctgctgtactcctacggcgtggccaagcggaagatcagcgccgcccagatgtgccgggtgctcagcgagaatcccgcccggctgtatggtctctatccccggaagggcgtgctgcggcccggcagcgacgcggacatcgtggtctacgaccccggcgccagccatgtgatccgagcggaggactgcgtggccaatgtggactacaacccctatgaaggcttcgtcaccgccggcggcatccggcaggtgtggctgcgggggcagctctccgtggaaaacggaaaggtcctggtggaggcgccggcgggcaagtatatggcccggggcaagaactccctgtgagcattcgtccatgaatctcgtcatcatcgggcgcttccctgcggccacagacacgcagatcagggcattccttcccgctgaccgggaggtttttatcaccgaatcggatctgtccggcccctttttgcagagtgcggatgcgctcatcccggaacacatcccgattccctcttttggggacaaggctctgaagctgcggatgattcaaaccggggccgggtatggcgaagatagagccgtctgcttttctggtcaacatggccaagagggatcgttcacgaagaggtcctgatcgaggctttaagcgaccatcagatcgccggcgcttgcccggatgtctttgaggcagagccattttcccaagcaagctggctgagggcgctcctcaacgtaatcctcgcgccgtacacagcaggggatcctggcggcgtgaaactgcacgaaaaacaggattcctttttcccagtagcatccggcaggcacggagcggagaaatgcccgccaacatgctgaaccgggacacctggaaggcgtggagataagccccttctgcaggtggacagcccatagacgtaaaagagctgtgcgttcaactgaaaaacaggcgtctgcctcatttggaatgaggcggacgcctgttctgcttttcatgcgtttctgttactcttctgccagtccctcccactggacatccacgatggtgccgccggagaactcaatgtactcactcttcaaaatataatccgtcttgccgatccggacctcctggtctcccaccttggtggtcatgacctcgccggcaggcgtctccgtggtggcggtgaagagcagcgtcacatgctccggatcctcgatccactgcccatcggggcccagcacgtagtagggctccatctccacgctctcaatctggccgcccaccagagcgccggaggccatcagcggagagggcagatgggcctggcaggtctcgtacagctccgtgggcacaccctcgcacttaaccacataggtcaccttcaccatgccgccgtcctcggcggcggtgccgccgctgctgcccagcagcttccaggctccaaaagccaccaccgccacgatcaaaatcacggcgatgatgtcgatgatgttgaactttccaacgcgttttgctttctgttccatggtctcctccgtaaaaggcgcggacgcgcctgtatttggcgtttgtcgtctggacaatatctggttcgtattgtataatatttctcgcgatttcacaacccctatttgcggaaagcggaaagaaaggcattccatgaaggtcattcatctcatcagcggcggagactccggcggcgcaaaaacccatgtgctgagcctgctgcaacatctgaatcaaaccatcaccgcccagctggtgtgcttccgggacggcccctttgccgaggaggcccgccagatgggcattcccaccatgatctgcgggggcaacaacgtcttccgcacccggcggaagctggcggcctatatccgggagggcggctacgagatcatccactgccatggctcccgggccaacatgatcggcgccatgctccgcaaggtcacgggactgccggtggtgaccaccgtccacagcgactaccgcctggactacatgggccgccccctcagccatctgaccttcggcaccatcaacgccctggccctgcggcggctggattaccggatcggcgtgtccgacgccatggtggacctgctgatctcccggggcttcccggcggaccggttctacaccatctataacggcatcgacttcacgcccccgcccacccagggggaccggctggagtacctgaggagcctgggcgcagatgtggacgagaactctgtggtggtaggcatcgccgcccggatgaatccggtgaaggacatggccactctggtgcggggcttcgccgcgggccacgccaagtgcccccgactgcggctgctgatcgccggcgacgggccggagaaggacaagctcaccgccttggcggcagagctgggcgtagagcggcaggtgtgcttcgccggatggatctccggcggcatggaccggttttacagcgccctggacatcaacgccctcaccagcctgtccgagaccttcccctatgccctgacggagggggcccggttccatctggctaccgtctccaccgccgtgggaggcatcccctatctcatcgaccaggacgtgaacggctatctcttccagcccggcgactggcaagccctgggcaacgatctggccgccctgggcaatgacgatgaattgcgccgccgcttgggggaaaagctctatgaaaaggcgtccacccagttctctattcagaagaccgtgtccacccagctgcagatatacgcctccatcctccgccgccaccggcggcgctcctccgcccgggacggcgtggtgatctgcggcgcctacggccggggcaacgcaggtgatgacgccattctggaggccatcctccaggagatgcgctccatcgacccggacatgcccatcaccgtgctcagcaaggatcccaggagcacccggctcacctaccgggtgcgggcggtgcaccgttccaacttcctggcctggcacgccgccatgtggaacagccgcctgtacatcaacggcggcggcagcctgatccaggacgtgacctcccgccgctccctgtggttctatctggccaatatccgggcggcaaagcgggcaggcaaccgggtacagatgtacggctgcggcatcggccccgtcacccgggagagccaccggagtctggccgcgaagatcatcaacaaatatgtggatgtcatcaccctgcgggagccggactctttggaagaactgcgggccatgggggtgacggagccggaggtcctgttgactgcggacccggcgctgatcctgcagaaggccccggacgacgagaccgacagcgtgctgctgcgcgccggtatcccgccccacggcaattacctctgctttgccctgcggcggtggaaggggtttgaagagaaggcccccctcttcggcgcggcggcggaatacgcctaccgcacctatggtctgacgccggtgttcgtggcggtggaaaagcatctggaccccggtgcgggccagctggccgcccgcgggctgacgatcccccactatttcctggacgatgccggcggcgccgggaccatcatcggcgccctcagccggatgcaggcggtggtgtccatgcggctccacgcgctgatcttcgccgccgggcaggggatccccctggcgggcgttgtctacgaccccaaggtctccgccttcctgcggtatatcggacaggagcagttcgtggatctggcagagctgaccgggcagaatctctgcgccatgatggaccagtgcgtagcccaggcggcccacccggaggcccaggccgccgccgtgcggaacctgcaggccatggagcagaagaatgtggaggtggcccgccgcctgctgaagggttgacggggccacctgttggaggaatctatgaaaattatggtctatgaggcccgcccggacgaacgggcggacctggagaagcaggcggcgctccacggagtggagctgtctgtcacagacgcggtgcccacactggagaacgcctctctggccgccggctgcatcggcgtgtccatcctgggccaggggtgcatcgacgcggccctgctggatgcctatcacgccctcggcatccggtatctctccacccgcaccatcggatatgaccacattgacctggaccacgcccgatccatcggcctgcgggtgtgcagcgccagctatgcccccaacggcgtggccgacttcaccgtcatgatgatcctcatgtgcctgcggcattacaagcaggctctgtggcgggggcaggtcaacgacttctctctcaccggcctccagggccgcgagatgaaggatctgaccatcggcatcatcggcaccggccggatcggcgcccaggttgcccgaaatctctccggcttcggctgccggattctggcctatgacctgcggcgcaatccggcagtggaaccccaggtcacctatgtggacttcgacacccttctggcccagtcggatgtcatcaccctccacatgcctctgctggactccaaccgccacatcatcaaccgggaatccatcgccaaaatgcgggacggcgtggtaatcgtcaactgttcccgcggcgagctggcggatatcgaggccctgattgaggggatcgagacgggaaaaatcggcgccctgggtatggacaccgtggagggggacgagggcatcatccacgccgaccaccgggtcgacattctgcccaatcggaactggttctatctccaccagttccgcaatgtcatcatgacccagcacatggccttttacaccgatgccgccgtgtccagcatggtggactgcggcatcggcggcatctgtcagatggccgcaggcgagtcctgtcccactgagctgacaggcccggtacagtaagccgctacctcccgccgcgggtccggcggcgctggacggagatcgtctccagcgtctctcccagctgaaccagcagcgccgctgtcagctccaggtcctcgtcgttcagccgggcagccagagagaccgccagggtgttgacagcggtggtcagggccagcggatcacaggaaagttccatcatcgcatcaccgctctcattctatgcctgagcggagccattcatcctgctccgccggtgtgaacacattttagaaagggacggccgccctgtgagcggccgtccctttttccaaaatgcacgtgctcaatccctctccgtctcttccccgcctccctgctggaaggggggcaccggctcaccggcgtgataggcgttggtgcggacattgatatactgggccttcagcttggagtagacgatggtctggctggagtacagcccattgtagccggagagcatgtagctgatgccgcagatcagggcaaaatacagcagcccaccatccccgaacagctccacggacaggaagatggaggccagcgggcagttggtggccccgcagaacacagcggccagccccagcgccgcggcgaagccagccggaatccccagcagcggccccgccacacagccgaaggtggcccccacgaagaaggagggcaccacctcaccgcccttgaaccctgcggagagcgtcaccgcggtgaacagaatcttcagcagaaacgcctccggccgggcagtgccctgctccacggcggcggtaatgagatccatgcccgcgccgttgtaatcccgggtcccgcagaggtatgtcagggcaatgaccgcaccgccaccgacaaggacgcggagccaggcattgggcaggcgcttcttcatctgatgctccgcgaagtgcagggtccggcacagcagaacggacaccagggcgcagcctacgcccagcaccgccacccgcagcagcatcagcttctccagctccggcgccgccacagaaaagcgggtgggcgccacccccaactccacagaaatccagtaggccaccagggaggcggtcagacatggaatgaacgccacgtggtacaccacgccgatgctgatgaccacgatggcgaacaccgtggcggtaaggggtgtgccgaacaaggcggagaaaaacgccgccatgcctgccatggtggcggtgcgcaggtcccggtcatccagattgaaaaggttccccgcatggcggccgatggtgccgcccatctggagagccgcgccctcccgtccggcgctgccgccgcacaggtgggtgagaattgtccccaggaagatggcgggcagcagccagatggacaggggctttccgtggtgtaccgcgtcgatgatgtcgttggtaccctggccctccgtctttgtcagcttgtagaaggccacgatcaccagtcccgccgccggcagacaccacaacagccagggatgttgctcccgcagctctgtggcccgctccacaccgatgtggaacagggagcccaccacgccgcagcagacgccggtgaccagcgccaccgccagccacttggccatggcctggacgtaaaggcccacgcgggtgtggccatgctccttttccaatccgttcacttcccttccccgccgccgaagggcgggccgtgcttgcaatggaaatattatacggcaggccgccgttctttgcaacaggcatggtgcgccacgcgaaaagggccggtccgaaaatcgggccggcccgtattgtcaggcagactcaatcactttgcagcagcctttttcctgccccacatcttgttgccgtccttgtcccatataccaaagccggagaaggcgcagaggatggagaagatgggtacaatgaagatgaaccagcaatacgggatatactccgtgccgcagcccagtacctccatcacatacagcgtggcaacgccccaggggacgatgggtgcactcagggtccccgcatcctccagcgtccgggagaggaccctgcggtggatgcccatgcggtcgaaggcgtcctcgaaggtctgctcggtgacgatgatggccacggtctggccgccggccgtgaggaagttgacgatgtagcagtagatcagagtgacggtcaccaggacgccgcggctcttgatgaacttcagcagcacgtccttggccagcacgtccaggatgccggtggcggtgatgatgccgcccatgacgctggctaccatgaaggtgatcagcagaccggtcatgctggtaatgccgccgcggttgagcatcgggtccacaatgtccacgccggtagacagtgtgaagccgttggccgcatagttcatcagctccacaaagttcactccctgaaataccatggcgaacacgatgctgaccaccacagtgaggcccatacccagcagggccggcagcttgaacaccgacaccagcagcaccaggatggcgggcaggatcaggatgggattgaggttgaagtgctccgccagggtgtcgcagatcaggttggcgcgagtcgtatccatctcgccgccgctatgcatcaggccggcggcggtaaacagcaccagcgccaccagtgcagcgggaatagtggtgtacatcatggacccgatgtggtcatacaggggaaccctgctgacaccggaggccaggttcgtggtgtcggacagaggggacatcttgtcgccgaaccaggcaccgcagaccaccgcagcaatgaccagcggtaccgggatggaagtagtggaggccacgcccaccagggcaatgcccatggtcgccacgctgccgaaggaggttccggtgaactccgccgtcagcccgctgaggacgaaggccaggggcaccaggattttcggggagatcagcttcatgccgtagtacatcagggccgggaccgtgccgccggccatccagatgcccaccagcatgcccaccatgatgacgatcaaaaatgtcgggatgcagtcggacaccactcgcaacagcgtcctttccacatccgcccaagggatatccagcaggagcgcgattaccacggcgatcagggccgcgatgaacacggacatagtggtgtccacgcccaggttgatgagcgccaccagcacggccacgatcaccaggaaggagatcacggcgaaagccggagttggggtcttccgcgtcttgactgtctttgtcttatccattctcgtttctcccttctagattgtacggcggcgcgggaccgcgcccgcggcgccgcaggagtcctccgttcagcccagcagctcccgggtcaggaatgccagagccgagtccatccgggcggcccgaaacgcacaggatttgaatcggtgctccgcgccatggaccaccaggaattccgcccggtctccatagatctccttgtaccgctccgaacagtggatggaggccgtcacgtcctcatccccgtgtaccagattcacgcgcttggtgaatttggccgccacggcgtaaggatccagctccaaggcatcctgatagaagcccaggcccacccgcaggccctcgtagtctgcgtagcccttctcctcgatgtcagacacatccacgccgcagagcatcttgtgcttcatgttgtagaccacgtccggcgccgggcaccacaggctcagggcgcacacgtccgcatcccgcaggcccgccaccatggaggccacacatccccccatgctcaggccgtggatcgcgatccggctctggtccacaaagtccagactcttgacatagtccaagatggcaaggccgtcttccacctcactggagacagtcatgtcctcgaaccgcccgtcgctgtcgccgctgccggcaaagtcgaaccggacactggcgatcccccgctcacacagcctgcgggagagctccgtgtggacgaagttgatctcgttccggtcgtcgcagaagccgtggaacaggatcacaaagggtactttccccggccgctggtctggcacatgcagcatcccccgtagggtcaggccgcggctctcgcactccacataccgttccatctctcttcctcctttctccgcaggcaccgttccgctggccggcccccgcttggtttctgatctatgcaaagccgctccgcggcctcacatctcactcaggcctcctgccggaagcagcgcccctccacccgggcgcccaggcggctgaacagctcgttggtaatggtgccggcgttctccgccagctcctctgcgtagatgacacagtccccctggcggccgatgaacaccgcctcgtcccccacccggacatcttcaatgccggtgacgtccagcatcagctggtccatacagatccggccgatgccctgggcgtactgtccccggacgatggcccgcagctttccgccgctgaggcagcgggggatgccgtcggcgtagccgatggagacggaggccaccttggtgggccgctccgcccggaagatccggccgtagctcaccgtctccccgggtccgatctcccgcacagaggtgatccgggccttcagggtcatgaccggcatgggctgcaggtcctcccgcaggtagtccgccgcgctgctcttgacgccaaacatcaaaatgcccaggcgggcgtagtcataggcgtactccgggtagttcaccgccgcatagctgctcagaaggtgaaccgtccccagctccacgccccgggcctggagggactccaccacgcttttgaaggtctccgcctgccggcgggaaaagtccacatgttcctcctcgtccgtgtccgccacgcagaggtgggagtagatgccggtgacctgcaggacgccgttctcatacacccgccggatggcgtccaggtcctccggcaggaatccgatgcggtgcatacccgtgtccactgcgatatgtaccttgaggcgcacgccgttctcccggcagtaggtctccagctgggcggcgtggtccgggcaggtggcggtctgggtcagcccgtgctctgccagcaggtggaaatacgcaggggcgctgtatcccaggatcaggatctccccctggatgccggcctcccgcagctggaccgcctcgtccagcgtggcagtggcaaagtggcggatgcccagctcccacagctgggcggccaccgcccgcgccccgtgtccgtaagcgtccgccttcaccacgcccatgatccggcagcccgctggcagaaggctctggtagcgccggatgttgtgggccagggcctccctgtccaattcaatccaagtccgattcatctatctccctgccgccgcagtgcggcggcgctcccttcccaaaattcttgatcccgtcaagaggtcataccaatggcaatttttttcagaatacccgaagtctgccaaaaaagcaagttttctgcaagtttttttgtgcccctaaaactttttacgggctgtccgccgtcctctctcacaggcggactcatcccgcttttccggttgattctttccaattctgtgctatactggaagaggaaacagacagatgtctgcgcgccgatgcgaaaccccagaacaaaaaagtttggaggaaatgagtatgaaatacggacgtacctataatttctccgccggacccgccatgatgccggaggaggtcttggaggagatcgccgccgagatgatgaattaccggggcagcggcatgtgcgtcatggagatgagccaccgctccaaggtctttcagcagatccgggacgaggccgaggcggacctgcgtcagctgatgggcattcccgacaactacaaggttctgttcgttcagggcggcggcaccgtgcagttcgccatggtgcccatgaatctgatgaagaacggcgtggcctgctatgtggagaccggcaactggtcaaagaaggccatcaaggaggcccagaagtacggtgaggtgaagatcgtcgcctcctccgcggacaagaacttctcctacatccccgactgctccgatctggacatccccgacaacgcagattacgtctatatctgcgagaacgagaccatcaacggcaccacctatttccatctgcccaacaccaagggcaagatccttgtgtcggatcagtcctccatgttcctctcccgtccctgcgatgtcaccaagtacggcctgatctgggcgggcgtacagaagaatgtgggtcccgccggcatggcggtggtcatcatccgggaggacctgttgcgggaggacctgccccagttcgtgcccacttacatgagttacaagacccatgcggacaatgactccctgtacaacactcccaactgctgggccatctactgctgcggcaaggtcttcaagtacctgttggcaaacggcggactggaggccatgaacaagcgcaacgaggaaaaggccgcggtgctgtacgatttcctggaccagagcaagttcttcaccggtgctgtccgcaaggaggaccgttccctgatgaacgtgcccttcgtcacccccagcaaggagcaggatgccgatgtggtggccgcctccaaggccgccggcttcgacaacctgaagggccacaagagcgtgggcggcctgcgggcgtccatctataatgccatgcccaaggagggcgtggaggccctggtggagttcctgaagaagtacgaggcagagcacgcgtaacggctttccatgggggacctgctcccccatggaggccccccgtcagtctgcagactggtgaacgccgcccaaggcgtctgagtcggggaattttcggcaggtacacgccctgcggaaaaggattaaaaattcttcttttgcctccggcaaaagaactggggaaaccggcgaagcgccgccagcggtctcgaaagcgagccgatttcgagaccgcggcgcgattggcggcccaaaagggccgggaatcgcaatgccgcaacggtgtagcccccacgatttctaccagcccccttccttttgtgcgggtgggagagcgagtggaacacgccaggcgtatctccactcttcacgctccacatcttcactccggtgaagccagagaggcttcgccttcccccttcctgcgatggagtccggagcgtcaggcagactgccgtacgcgcagctcctatctctgaactccactctcacggaggcgcctgtcccccaatgggcgtttggggtttccgacattggcacccctggggtgtgccggaaatgtatgaaaaggggtattatatatggcattaagagttttggttaccgatgggatggatgctggcgcaatggaacagctgcgcaaggatggatatgaagtcatcgagcagttctatgagcccgatcagctgggcgcagccctgcgggacttcgacgtggttatcatccgcagcgccaccaagatcaaggagccgcagatcgacgccgccgcaggcagccgcctgaagctcatcatccgggccggcgtcggtgtagacaacatcgcagtcaaatacgcagaggaacacggcatccaggtgaagaacacgccccgcgcctcctccaacgcggtggcggagctggctctggccctgttgttctcctgtgcccggaacatctccatcgcgggccacaccatgcgggagaacaagtgggagaagaaagcctactccaagggctttgagctctccggcaagactatgggcgtcatcggctatggccggatcggccagctggtgggcgccaagggtcaagccctgggcatgaatgtgctgtccgtggtccaccgcaacaagccggagggctgcgagtgcgagaccatgcactttgtcactatggacgagctgctctcccagtccgacatcgtcgtcctctgtgcccccagtggcgacaagcccctggtggatgcggagtcccttgcgaagatgaaggatggcgtggtgatcatcaacgtctcccggggtgccaacgtgaacgaggccgccctgctggacgctctgaactccggcaaggtcaaggccgccggtctggacgtgtggctgagcgagaaggatcccaactgggccctggcctcccacccggctgtctcctgcacgccccacatcggcgcaggcaccaaagaagctcagaaacgcatcggcgcggaattggtggacattgtagagaacttcggctgatcagcattcccggtcaaacgcccctcccgttttcacgggaggggcgtttttctgtgccgtctttccgattttttctttttccgtaaattgttcctatatttttataattttttaactgccatctctatttacttttcaaagttggcagtgtataataggggccatacaatcgcagaacagaaggtgatggcttgaggcaggcagttgtcccgtcccagtatctgcagatcgctttggatctggctacccgcatcgcccaaggtgagttgacggagggcagccggatttacggtcggtcggtgctggcgtcggagtacggggtatccccggagacgatccgcaaggccctacggctgctggcggacatgaaggtggtggatgtgaagccccagagcggggccgtagtcctctccgccgacagcgcccgccggtacatcgaaaacttctccgaggatgcggacatccattccctgcgcctccagctgaaggcgctgctggcggagtccgccgaggtgaaccggcgcatggcggacaccgtgtcggccctggtaaaagggcaggacacatttgctgcggccggtcagcccctccccaactatgaggtccctgtccccaaggactctcctctcatcggcaagagcatcggggagctgaaattctggcagtccaccggcggcaccatcgtggccatccggcggggccagacggtgatcctctcccccggtccctatgccgaactgtacagcggcgacgtcatcatcctggtgggaagccccagcgccgcagaggccgcccaccggctagtaacgacaaaggagtgaaggcagcgatatgatccagtttgaacacgtctccaagagctatggcaagaccccggtcctcaaggacctgaatttcaccattccagacggacagttcgtggtcctgatcggcccttccggctgcggcaagaccaccaccatgaagatgatcaaccgcctgctggagcccgattccggcaccatccgcatcgacgggcaggatatccactcccaggacaaggtggagctgcggcggcatatcggctatgtgatccagcagatcggcctgttccccaacatgaccgtggcccagaacatctgcgtggtccccaagctgctgaagtacgacaaggcccggtgcgatgagatcgtccaggagatgctgcagctggtccacatggagcagtctgccaacaagtatccttccgagctctccggcggccagcagcagcgcatcggcgtgctgcgggccctggcagcttctccccccatcgtgctgatggatgagcccttctccgctctcgatcccttgactcgcgagtccctgcaggatgaggtgaagaacctgcagcagaagctgaacaagaccatcgtcttcgtcagccacgacatgagcgaggcgctgaagctggcggacatcatcatcttcatggccgccggagaaatcgtccagatggcctcccccgaggagatgctggagcaccccgccaacgatctggtccgcacctttatgggcaagcacacgccggacaccgccccctccaaagtagagagcttcatgcgcaccaatgtgttcagcgtccggaaggatcgcggcgtgttggagtgcgccgagcgcatggcccgaggcagcgtggacaccctgctggtcacagacgagcagaaccggtacttaggcaccatctccatcggcgacatccgccactggggccgggaactcaccagcatcgagcctctgatccgccagactgcccggaccgtccgggtgggggacgaggccaaggagagcttcgactacctgctggactccggtgccaactacgtggtggtgctgaatgcggacgacaccatcgccggtatcgtcaccaagaccagcgtggcccgcagcgtggcggagaatctgtggggtgattccaaatgatgacgctgatccaggactacggcgccgacctgctgcgggccatcggactgcacacgatatatgtgctgatctcggtggtcatcggctttgcggcgggactggtgttcggcatcctcctctcccgaatcccgcggtggctgtcgggcatcatcatccccattctctccatcttccagaccattcccggcctggtgttcatcggcgtgctgttcatctggtgggggaatatctatcccacggtgatcgtggccctcagtgtgtacgccatgttcccagtgctgaaaaacacctacaccggcattctggaggtagagccgaaatacatcgaggccgccaagggctgtggcatgtcctccttccagacgctggtgcgggtggagctgcccctggccatgccggtcatcatctcggggctgcggatggccgccatctacaccgtctcctgggcggtgctggcctccatgatcggcctgggcggcctgggcgactttgtgtaccggggcaccagctccaacaacaacacgctgattctcctgggggccatcccggcggccatactggccgttctcttcggactggtcattgacctgctgcagaaaagggtcacgccccgcggcctgcgaaaggaggcgggcaaatgagctgggacctgatttttcaacatctcttcatcgttctggcggccagcctgctgtccatcgccgtgggactgcccttgggcatctgggcatacgtctccaagaccgcccggcccgtcatcctgcggattgtggacctgctgcagaccattccctccctggcccttctgggcatcatcatggtggtgctggaccccggcaagctgacggtcatcaccggcatcacgctgtactccctgctgcccatcgtgcggaacacctgcttgggactccaggaggtggacccgggtgtgaaggaagccgcccggggcatgggcatgagcaagccctaccgggtgctgatggtggagttccccctggccttccccacggtgttcaccggcatccgcatcgcggtggtaaacgccatcggcactgcggtattcgcagctttcgtgggcggcggcggtctgggcggcgtcatcacccaggccatccggatctccgatatgtccctgattctggcggccaccggcgtccttatggtcatcgccgtggtgctggacctcatcatgagctggttcgaggggcagatgcgcaagagccggggcggctccaagaaaatgtggatcccggtggcggccatcgtactggcgttcatcctgctgctgccctatggccgcggcggcaccggcgacattcttctctatgacggcgactactccgaaacccagctgatgcaccacatggtaaagatgctggtggaggaccagacggacctgaccgtcaccattcaggatcagatgtcccaggtgaacaactggaactccctgaaggatgacagccacacctgcgacctgatgatctcctacgacggcacgatcctcaccacctttctgggccaggacacggtggacgttccggagggcatgacgatctacgactacgtccagggcgagctggacagctacggcctcacccagctggagcagctgggctttgaaaacacctacgccatcggcgtgccccaggccctggcggacgagtacggcctggagaccatcagcgacctcatccccattgcggaccagctgaccttcggcgcggagcaggagttcttcaccctggagggcagcatgaagtatgacccctttgtgaagttctacggtctgaatttccaggacgcggtctctgtggatatgggcctgaagtactccgccattgaaaacggcagcttcgatgtggcggtggtctactccaccgacggcctgaacaaaaaggtcgggctgaaggtcctggaggacgaccagagcttcttccccgactacaacggcgtctttctggtgcgggacgatctgctggagaagtacccggaggtggcggacattctgaaccaactggcgggcaagatccccaccgagcagatggcggagctgacctaccaggtggacgtggagggccgcactgtggatgaggtggcccgggagttcctggtgagcctggggctgctggaggcctgatccccgctctctttcaaaaccgctctggagcgtccgcgctccagagcggtttcctttggaaaatttccacttctttgcaaccggcatcacgttttctcgtctatgttggtgagagaacctccagccgtgggctggagacaggaggaggatcccatgaatctgcaaaagcggtacttattgatgggcggagccgtgctggccatcctgctgacgctggcggcaggactgctgttctggggccggaggcccttccggggtctggaggcggcggacatcgccgcagccaccgtcctggtggcccccccggatgtgacactggagctggatgccggggagatcgagaccctggcggatctgctggcagatgtccgcatcacgcggccggaccagtcctattcggagtatgccggacagaccgtcctgttcacggtgaccatggctgacggcacagctgcgaacgtcacggcctacaacccgtttctgattatcgacggcaccggctggcgcaccgcctatgcgccctgcgaggcgctgaaccgctttgccaacgagctgctgcgggagagaggaggataacatggaggacacggagatcatcgacctgtactggcagcgggatcagcgggctattgacgagacccacggcaaatacggcggcttcctggcggggattgcctggaacatcctccgcagtcacagcgacgcggaggagtgcgtcaacgacacgtatctgcgcacctggaacgccattcctccggcccgcccctccgccttccgggcctggctggggcgcatcgtccgcaacctctctctggaccgctggaagcagagccgcaccgccaaacggggcggggacggcatggaggtgctgttgggggagctggatgactgtgtgccggagccccacggaaccgagaagacgatggaggaccaggaaatcgcgtcgctcatcagcgcgtttctgcggcggcagagtccggagagccgcatcatcttcctgcggcggtactggtacgggcagagcgtggcggatattgccgccggaatgaactgcggagaggggaaggtcaagtcctctctcttccgcacccggaaggccctgcggacctatctggaacaggaggaggtgtttttgtgaaagcggagcggttgtttcaaatcctgggtctggtggacgaaagcctcatagaggaggcggacaccgcctcctcccccgccgctgtacagcggcggccctcatgggttcggcttttggccgcggccgcatgtctcgcggtgatctgcgccggggcgtggggactgtggcaatcgaatctgggagcgggcaccggcagccccggagatgccgcgctggccggtggagaatccggcggtgacggccacagcccgggcactaccttcctgtcctacgccgggccggtctttccgctgaccacggcggaaacgaacacccgcctgaccgcagggcggaccgtcacctgggattttgcccccggctcctatgaggatggatccccccgacagtggggggcccaggtgacagacagctacacgctgaccaatcctgctgacggcagtgtgacggtcaacgccctctaccccgtctccaccagctggctggactttcccgagctgaacgctgctgtcaccgtggatagcggggggaccggtttctctgtgctctccggcggctacgccggaggctttcaggacgccggggagccggacggctccacctggaacctggccccgccggacgaatgggccgattatcaggcacttctggcagacggagaatacctgtcccgggcgatggaggaaactgctgccccggaggtcccggtgactgtatatcagttcacggatttcgccgcgccccatgaggaatacaacgccgctacccaggcggtgaccttcactaccgacccagaggccaccacagtcctctcctacggcttcaacggcatgagtcgggatgcggaccggggctggtgccagtacagctatttcgttcccgacggtgtccggagagagacggaaacaaaaattctgatcgtcctgggtgatgacatcggcgattatgtcctccaggggtatgccgacggcggctgtgaccaggagatcgatggggtgtcctgcaccgtcacccgccgggagaccaccttggccgatgtgctggacctgctgtgccgggcttatcaggcggaatttgagcagttcagcctgggccgcgggcaggaaagccccttccggtatctctctcaggcgcagtaccagggattggtgtggcagctgctggagcagtacggcctcttctccggcacccccaaggaccggtacagcgacggccggctggatgagatcctgatggaagccctgtcccaggagcgggtgctgtacctgtccttccccgtcaccgtcccggcaggcggcagtgttactgtggcggcttctttttggaaggcacccagctatgactacggctgctctggttcggagaacgtgggcctccagggctatgatctggtgacggccctgggatccacgctggagttcaccggccagaccgccgccctggtgaacacggacaccattgagatcgtccggcagaacctgggctttgatctggaaaacggtgttacccaggtatcgctggatctggcggagcctcactactatctggaaatccgtcctctggagggataatcacaaagacgcgcctatggaagttccacaggcgcgtctttggcatcgttcacttcttccggccccgtatccaggccgccagaagcagccccgggagggaggccgcgaggactcccagctccaggatctcctgaccccctgtgcgttcagcaggggactcttcctgaacgggcagcgaatctggtcccatctccgcatcagccgcatcggcctgccgtgcctcccaagcttcaagggaggccgatttcaacacagcaggcggcggggcatccgctgcccaggccggggacggggagggcatccggacctggtccagcagcttttccggcgcagcggggctccggtccggtgacgtctcccactccgggagaaacccggcgctggggaactgccacagggagccgtccgccaacaccgccagggtccggtcgctgcaggggacggcacaaaccacaccgttcgtgatccgcacaatgccgtcacaggcctccgtgtcataggggtcctccgggtccaccagaccgtcccgcagcatggccgggcggtcgctgccccaggcccagagagttccgtccgccgtcacagcggtacatctggtgaactgcaccacatcctccagcagtttttccggctggcccagggactgccactggactgtatccgacagattattctcccagggcacacgccagagactgccatcctacccctggactagcatggcagggtcctgaattccgcagtacagactgcccacagcggccacatgttccatcaaaggtgccgcggtacaggtatccccgtcaaaccagacccgcaccagcgtcccatcctccttcaccgccaaatccccaaacagctgaaccacctggtccagtacctgggtgggcggatagtagggatcatcctgatgttcctccagggacactccggaccgggcgccccaggtccacaccgtcccgtcagcgcacagggcagaacattccgtctccccgactgacacggacaccacgtcctccagcagccggtacggctcctcctcgccgaaggtccggcccgcgtggccgccccagccccagagggtcccatcctcgtcaatggcggcggccgtgataaaccccgcgtccacataccgggcattctccagcaggacattggcctcctcccagggcagcgggtcctggtccgtggggcccaccgcgccgtggaagctgtctccccaggccagcagggcgccgtccgctcggatggcatagtaagtgtatccgctggtggcaatgggttggctgattgattccagcgccgccgctgtaccggccagcagcatggccgaaagaagcccgcaggcaagtattttcatatccgccgcctcctttttcccactgtaccatacagcctatccaaaaagcaaaccccgcaccgtcccggcgcggggcttgtcctttatttctcgatcttcacaaatttctccgccggggcgtgacacaaggggcagcggaaatccggcggcagggattctccctcatagacataaccgcagacagtgcagcggtagccgttgatctctaccgtgcggtacacggtggcagtgggcggcgtggccttgccccggtccgtataggcctggagggtcagcaccctcccgtctcccaacacctccgcctctgtggcctggcccacgaaaaggaggaagctgccgatctccatctggtccaccaccttgcatgcgatgcgggagaccatgtgctccttcaggtatggattgccgttgctgtcggtctccgccgcccggccggcgaacttgtccgtcacccggccggacttgtagccgaacaggtcgatgatctcccccggcgcgtccgcacccaacagggtaacggagaagctccccgccgcctgaatggccttgcaggtctcgtggtccttgttcaccgccacggtgaacttgggcgggaaggaagaggtcacctggtggaaggagttgacgatgcagccgtggcgcttgccgtccgctgccgcagagagcagacaaagggcgtagtccatcttctgatatgccttgttgtccatattgatttcctttctggcggatccgccgccggacatcccgcatgtttctcttgatggaataagtttaccagaagccgccattttatgcagttgcatccgcgactgctgccgcgcaaaaattttcttccgttttctgtggacaaataccggatttgggcgtatactctccttaaccagatgccattatcctgatttatattttctataagtctggataatggcttaaaatctaaataaaaggagtggttctatgtctgagagctacgctggcaagatcaaccggaagctgctgaaaaagcgccgcatcatcaacgccgccgccgggcgggagccgtcggacctggtgctgaagaacgccacctatgtcaacgtcttctccaacgagctctgtcatgcggacatcgccgtggcagaggggctgatcgtgggcatgggccaatactccggcacggtagaggaggactgcacgggtaaaatcgtcctgcccggctttctggatgcccacatccatctggagagctccctggtctctcccaaggagttcgtgaaggccgtgctgccccacggcaccaccaccgtcatcaccgacccccatgagatcgcaaacgtcatgggtaccgacggcatcgagtacatgctccaggccacggagggcctgccggtggacgtgcggtttatgctgccctcctgtgtgccggccacgcccctggacgagtccggcgcgtccctggactaccgggccatcgactccttctatgaccacccccgggtccagggactggcggagatgatgaatttcgtaggcatcatcgccggggacgaccagccggtggagaagatcgtggccgcccaggcccaccacaagaagatcgacggccacgcgccggatctggtgggcaacgacctgaacgcctacatcgccgccggcgtctattccgaccacgagtgccacgacctgaacgacgccatcgccaagctggagcgggggcagtttatcatgatccgggagggcactgccgcccggaacctggacgcccttgcccccctgctgtgcgacaaatactccgagcgatgcatgttctgcaccgacgacaagcaccccaacgacctgctggagaagggccatatcgactacatcgtcaagcgggccatcggcctgggggtggagcccatcaccgccgtgaaggtggcctgccacaacgccgcccggtacttcctgctgaacaaccggggcgccatcgccccgggctacctgggggacttcgtcatcatcgacagcttccaggacttcaacatcgagagagtcttcaagaagggcgagctgatggtggaccacggcgtggtgaaggacttccccgccccggccatcgacccctatctcaccgaacgggcccacagcaccttccatgtggagcacctgacggcggaggactttacggatgcccggccccggggcatcatcggcatggtgaacggggagatcaccacggtggacgccggctactccgaccggatcgacgtggagtatgacgtgctgaagattgccgtggtggagcgccacaagaacacccatcatatcggcatcggctttctccagggctacggtctgaaatccggcgctgtggccacatccgtctcccacgactcccacaacattatcgtggtgggcaccagcgaggacgactgcgccgccgcagccaaccgggtggtggagctgaacggtggcatcgtagtctgggaccagggcaagtcggtggcagaagtccctctggccatcgcaggcatcatgagcgatgagtccctgacatctgtcaacgaaaagctggaattcgccaaggcaaaggcccacgagctgggcgtcaatccgggcattgaccccttcatgaccctgagcttcatggccctgccggtaatcccctccctgcggatcaccacccgcggcgtgttcgatgtcaccacgcagagctacgtgtgaggagagcgaatatgctggaatttcttctgggggcatgctttttcctgtgcatttttgcccccttcacctttgtgatctttctgatcgacgccatcaagaaagttgtctccggcgatggaaacgagtatttccccggtctgggcgccgggctaagcctgtttatcatgctgggcgggatcttctatgtgcttttatgaatgcgcaaaattagcactctcgataccagagtgctaaaattcacagatcgttcaaacaaatgacacacaatatccgattttccatcctatcataatacttgaaaagaagaacagaaggtctttgaaaggcacctgttccgcccggcggcatcaccctccatgatccatctgccgtcggtcccaactacggatcatcaggatttgataggaggaattgattatgtttgaaatgagaccttaccgcagaaattctatgagcacctggaatcccttctccgagatggaggagatggagcgtcgccttttcaacaacgacttcttctccggccgcggtctggcggagttcaaaaccgacatcaccgatgaaggcgactactacgagctgaaggccgacctgcccggcttcaagaaggaggacatccagctgcagctggacggcgacaccctcaccatccaggcccaacgtcactccgaacatgaagagcaggagaaaaaggggaagtacgtgtgctgtgagcgttcctacggcgcgtacagccggagcttcgacgtctccggcatccgggcggagggtattaccgcctcctacgacagcggtgtgctgacactgaagctgcccaagaagacagtggaggtttcctccagccggcagatcagcattgactaaaatcaaagcaggaaaagacccgcggtgtacgccgcgggtcctttgctgtcccttttccgtcatatctccgcctcttccaagggcaggaaggaccggaagagataccggccgtcctccgccgcctccagtgtcagctctttgcctcctccagtgaggactagtagcttcccctcccaccggccggcctcgcagatgaacatgccggggccggcgtcgctggtgaagttgtagaaggcgtcggtctccggcaagtacaccagctccccggagctctccggcacattcgtcaggtctgccgtggtgatgtcggcgtgctcctccaggtacgcgtccagctccgtccgccggtaccggtggatgggcaccggcatccggtccagggagtccaccccctggaagggccagcccccggcccccttcagggcctggaactcagcctcgtcctccaccgtgcccccgatccccatgtagcgcagaaactccaccaggtccaggtcctccggccgctcatagtaagaggtgaagaagctgcagacggaattgacgtatgagacgttctcccgctccttaaaaggcgcgaaggcctcgttcacctgggcgatctccttcaccgtcagggcgtcggcggcctccggtgtctccacctgttccgtctccgaaaaatcggccccgccgtcctccggtgccgttcccgccttgccgcagccggtcagcagcagggccagtagcagcgccccgacgcaggcgaatcggcatctacgcatacgatcccccccctttttctcagcaaaccgcaaaaaatccgggaaatcatcgcaaaacagccacaaattccgttgaaatcattacaagggcaacgcctcatgttccacggtgatctggcagctcttcatggccgcaagcgcggtccgatggctctccggggtgacacctgcgcagcaggcggcatccaccgctacctctgcctccggcaggaacgccttcaccagcaaggcgttggaaatcacgcagatgtcggtgcagaggccgatcagcgtcaccttttcaatgagttccttttcattctcctccgccagcagacgccccagctccgcgctgccgaaggagggcttgtccagaatggcctgtcctgcgctggcaggccggagctgctcgacgatctcccagccctcggtcccccggatgcagtggggtacaggcaggttccgcccctcccgggtatggagatagtccgccccatgggtgtcccgggtgaagaaaatccgctccccccggcggatgcctgcggccacccgctccgccgcagcaggcacgatccgccgcgcctccggtgtccccagagcgccggacacaaagtcgttctgcatatccacaacgatcaggatgttcattatgatctcctcctttttatcatcatagcagacgccgcgccgggccgcaagaccttccccgggggaaaagaatgttgacttctcttttcatccggtttaagatatggaatgtctgtccgccgaatttttcggcgaatgtgaaaaagagaaggagagagaagtttgagtcgcgaaaatttccgatcccggctgggattcattctggtaagcgccggctgcgccatcggcatcggcaatgtgtggaaattcccctacgtcaccggtgtcaacggcggcggcgtattcgtgttgttctacatcatctccctggtcatcatgggggttcccattctgaccatggagctggcggtgggccgtgccagccgcaagagcgccgtgctgggctacaaggccctggagcccaagggcagccgctggcacatccacggctggctgtgcgtaatcgggtgctgcctgctgatgatgtactacaccacggtctccggctggatgctgggttactgcttcaagttcgcctccggcaccttcagcggcatgcagccctctgatgtagacacagtctggaccgatatgctggccaatcccggcgagatgacgctctatatggtaatcatcgtgctggcgggcttcatcgtgtgcagcttcggtctgcagaaggggctggagcggatcagcaagtggatgatgatctgcctgctggcactgatcgtcattctggccatcaacagcctgaccctggacggcgctatggagggcgtgaaattctatctggtgccggactttgagcgggccgcggaggtcggcatcggcaatgtgatcgtggccgccatgaaccagtccttctttaccctgagcctgggcatcgccgccatggaaatcttcggcagctatatgtccgacgccaaccgcctgcccggcgaggccgtgcggatctgctgcctggacacctttgtggccttgatgtccggcatgatcatcttccccgcctgcttcagctttggtctggaacccggccagggaccatccctgatttttatgaccctgccacgggtgttcgtcagcatgaccggcggccggctgtggggcgccctgttcttcctgttcctgaccttcgccagcttcaccacggtgctggcggtgttcgagaacattatggccagctgcatggacaacttcggctggtcccggaaaaaagccaccatcgtctgcggaatcttcatcctcttggccagcatgccctgtgtgctgggttacaatctctggtatttcgaggcgtccctgcccagcggcgccaccggccagatcctggatatcgaggacttcctggtgagcaatctgctgctgcccatcggctccctgatctatctgctgttctgcgtcagcaagtggggctggggctttgacaagtatctggcggaagccaacaagggcaccggcctggggatgtcccccaggttcaagatctacttccagttcatcctgcccatgctgattctggtgatcctgctggtggggctgggcagctggggctggcgtgcccttatctgcgccgctgtggccgtgttcgtgtggttcatggcccgccgcagctcctccaaatccaccatttgagcgaagtgacctgtcaaaagagaggaccgtcaaagacggtcctctcttttgcatctcacggcagcttcgcctggaacagcccgtggcaggagcagcaaaggtacagcttcgccccgccccgcagctgggggatgcggaactcgctgccctgttccggatacagccgcgccagcagcagccggtccggtgtcacacaagcggtaaagcggatatagtgccccttgtccatggggtggcggaaggtgacataccagtcctcctccacctcctggaccgttacggcgtgatccggatctgcggaccggacctccaggggctccagccgccggccgcagcaggcaagctgccctcccgccgcagctgtcagaatgttgccgcagtccgggcacacgtaaaactgtatttttttcatatttcctccatccggcgccgccggaagcaggtctccgtccagaattccctccacgctgacgccaaaaatcttcgcaaggcgcggcagcatccccacgtccgggcagccctggccccgctcccacttgctgacggcctgagcgctgacgcccagcagttccgccgcctgccgctgggtccacccccgctccaggcgcaggcgccggagcagcgtcccggtgtcttggtcatgcatctcttctcacctctcccacaggatacccgaaattccgctggaacgcaagcaacgctccgttgagttcgtatggctctgcaaaatgtcgccgcttcgcttctcctagggctgttttcttggcgactcctccgaatttgcaggaagcggggctttttcctgcaaaatgacttttcatccggacggcgatatggtatattgggtgggagaaacacggctcccccgtgacacacaggaggtctcttgatatgataacacttcataacaacggcgtgttcctggcgggcggcgtccccgctgctgccggcccggtctctccggaggaggggcggaaacggaccatggcctggtccattctccaggcccacaacatctccggcgatccggagcacctgcagatccgctttgacgccatggtgtcccacgacatcacctatgtgggcattatccagcaggcccgggcctccggcatgaaggagtttcccatcccctatgcgcttaccaactgccacaacagcctgtgtgccgtgggcggcactatcaatgaggatgaccatgtcttcggcctctctgccgcgaaaaagtacggcggtatctacgtgcctgccaaccagtccgtcatccactcctatgcaagagagcagatggcgaagggcggcaccatgatcctgggctccgattcccatacccggtacggggctctcggcaccatggccgtgggtgagggcggcccggagctggccaagcaactgctgaagaacacctgggacatcaactatcccaaggtggtgctggtgtacctcaccggcgcgccccgccggggcgtggggccccacgacgtggccattgccctggtgaaggccacctttgcaagcggcttcgtcaataactgcgttttggagttctgcggccccggtattgcagctctccccatcgactaccgcaatggcatcgacgtgatgaccaccgagaccacctgcctctcctccatttgggagacggacggcgtgacggagggcttctaccgcgcccaccagcggccggaggattaccgggagctgcacccggcggacggagcctactacgacaagtacatcgagatcgacctctccaaggtcgagcccatgatcgccctgcccttccacccatccaatgcctggaccatccatgagtttctggagaatgccgccgacatcctggcggctgtggaggcggacgcccagaagcggtatcctaaggcccatgtgaagctcacggacaaaatccgtgacggcggcgtctgggcggatcagggtgtcatcgccggatgcgccggcggcctcttcgacaacattaccgaggcggcggacatcctccggggcggctccaccggcaacggtgccttcactctggacatataccccaccagtgtccccgtcagtctggagctgacgaagatcggtgccacggcggacctgctggagaccggcgccgtcatcaagcccagtttctgcggcccctgcttcggcgcgggagacgtgcctgccaacaacggcttgagcctgcggcacaccacccggaacttccccaaccgggagggatccaagcccgcggagggccagttcgccggcgtgtgcctgatggacgcccgctccattgccgccacggcggccaacggcggccggatcaccgccgccacagacatcgattacacctccgtccaccacgactaccacttcgacaagggcgtctatgaccggcggctgtactacggcttcggcaaggcggatcccagcgtggagctggtgatgggccccaacatcacggactggccgaagatgcagcccctggcggaaaatctgctggtggagctggcggcggtgctccacgatcccgtcactaccaccgacgagctgatcccctccggcgagacctcctcctaccggtccaaccccctgcggctggcggagttcaccctgtcccgccgggagcctgcctacgtgggccgggccaaggccgtggcggagattgaggcggaacggctggggggggacgccccggagaagctcaccgccattctggacaaggtgggcgacggctccgcgctggtgaaaaccactcagttcggctcctgtgtctttgccaacaagcccggcgacggctccgcccgggaacaggcggcctcttgccagaaggtgctggggggctttgccaacatctgctatgagttcgccaccaagcggtatcgctccaactgcatcaactggggaatcctgcccttcacactggacgcgggcacgtcctttgactacgcccccggcgactgtgtgttcgtccccggcatccgccaggccattgagaacggcattgaggatatcccggctagggtcatcaggacggacggcgccgtagagggcctgatgctccatgtgaaaggcctgacggacgatgagaaggaaatcattctcgacggatgcctgatgaactattacgccaagcgtaattaaagaggggacttcctcccctcttcagatcccccatttgcctctgccgttgcagcattatgattcccggccctgtctgggccgtcaatcgtgccgctgtctcgaaacagcctcacttttccgccacgggcggcgttttggctgtttcccagtgacatcggtcactggaggcaccgcccagggcggctaggtcaaagcattttcggcaggcacagaaggggaattgccccggaggggcgagagaggcccctctggagggtgccctggcgaaaatgattcaaagtggtccggctgcgccgggctccgaaatttctaatgattggcgaggttgagaccatggataaaatcaagatgaccacccccctggtggagatggacggcgatgagatgacccgggttctgtgggcctggatcaaggaaaagctgatcctgcccttcgtggacctgaaaacggagtactatgacctgggcctgctccatcggaacgagacgcgggaccaggtgaccatcgacgccgccaacgccaccaagcgcctgggcgtggcggtgaagtgcgccaccatcacccccaaccgccagcggatggaggagtacccccagctgacggagatgtggaagagccccaacggcaccatccgggcgattttggacggcaccgccttccgggcgcccattgtcctgcccatgatccacccggttgtgaagaactgggaggcgcccatcaccatcgcccgccacgcctacggcgatatgtacaaggctgtggacatggtgaccgaggagccgggcaccgccaccctcaccttcaagggcgagagcggcgcggagaagaccctcaccgttcagacggtcagcggtcccgccgtgtggcagggccagcacaacacggagaagagcatccgtgcctttgcccgcagctgcttccagtacgccatcaatcagcggcaggacttgtggttctccaccaaggacaccatctccaaggtctacgacggagagttcaaacggatcttcgaggaggagtatgagaccacctacaaggtggagtttgaaaggctgggcctcacctacttctacacgctcatcgatgacgcggtggcgcgggtgatccgctctaggggcggcttcatctgggcgctgaaaaactacgacggcgacgtgatgagcgacatggtggccaccgccttcggcagtcttgccatgatgacctccgtgctggtatctccggacggcaccatggagttcgaggcgtcccacggcaccgtcacccggcactactacaagtacctgaagggggagaagacctccaccaaccccatcgccaccatcttcgcctggtccggcggtttgaagcggcggggcgagttggacggtctgccggagctggtgcagttcggccaagcgctggaggatgcctccctggagacgctgaaagacggcgtgatgacaaaagatctgctggggctggtagagcccggcttccaggcccgcggtgtggacagtgaggaatttttggacgagatcgccaagcggttggccgataaattgggataaaaggggactgctaaaagcccggacgtctgttcagcgtccgggctctttttgctcttttgcaaaatcattggttgtgcggccgtttcagaattgattggagaaaatcgggcggatggaatagtagtagccggacatcaacagcggcacataggcctcatccgtggcaatgatggtcccatcctccagccgaaggccaaaagattccatgctttccgtgatatacagcatccgctcgacaccgagagaaaggttatcccccggccggtagaacaggatgtcctgggcgtctgtccacatggcatcccaccggatgttcgcatggacaccctcccggcaggtagtttccacttcgtggatagcaaactgcccctcaaaagagcggtctcccagaattttcaccgaaccatctatggcaactgtcgtctccccggccgacaccccttccgcactatatacggtggccggcacttccaaagagatctcctgaaggaacaccccggcccggtccagaattgcaaagaggacaaagcccgccatcagcaaagcacaggtgccgcccagcacctgactccactttctccgggtccgctcctttgcctgccgggccagaaaggccagggcctgccggatcgtcggctccggctccggcactgtcccccgctccccccgcagcagatccagcacgcccagccccaaagtatccgccagaggctccagcagggagatgtccgggaacccggcgccccgctcccatttggagaccgcccggtccgacacatgcaaggccgcggccagctccttctgggtcatattctgttctttccgggctgctgcgatcagcgccccggtctttgtccgatccatacttcatcacctggggccagtatatcaaatccggcctgctcccacaacaaacgctgcgtggaaccgcccagattccgccgaggcgccgtgtctttcggcagggtctttccacctcacggctgctctccgcccaggtgttcccgcagcactcggatcacccgcttcatgccgtccgtcagatacttgctgcggtggcgcaccaggaaatagctcctgtgaaacccgccgtcctccacagccagctcccgaaggtccccccgctccaggtccgccaccaccagagaccggggcagcagcgtgatcccaagccccgcccgggcgcaggccagcagggcagcggtgctgacgctctccactaccggctgcgccgtggcgcctgctccctgcaggccggcatccacactgttccgggtgccgctgccccgctcccgcaacagcagccgctcttccgccagctccgccagagtcagggagttctttccctccagatagccgggggcgcacactgccgccagctcctcaccgcacaggggctccaccaggtagtggggcgagacggtgacattgtccactacggcaaaatccagttcgttctgcaggatcatccgctctgtctccctggagttgtgaatactggcccggaccgtgatctcaggcagcgcctctgccagatgcgccaggatacccgcaaggcgggtctcgcccagcgtcacgtggacgccgaagcggcaggccccctgggcgccgctctcccgcaggacctccaccgattcctgaaactgggacagcacggtgtccgcatactgccgcagcgtacgccctgcctctgtcagatagacccggcggttcatccgctcgaacagccgcacgttgtaaaacacctccagctcccggatggccaggctcaccgccggctgtgccatattcagctgctccgccgcccgggtgaagctctcctgggcgcagacggcggaaaagatctcgagatgccgcagcgtcacggcactcccccctattcataattatttcattatgttttttatcctatcatatagattgatgaatgtcacgaaaaagcgtacgctgggggagaaatccaagagcgcgaaaggagcggtttccatgcccacagatctgaccaaagcccgtcagctgttcgggactttttccaaaatcggcgccttcacctttggcggaggctacgccatgatccccctgatccagcgtgaggtgacggaacgccgccgctggctggaggaccgggacattctggacattgtcgccattgccgagtccacaccgggccccattgccatcaacaccgccaccttcgtaggatatcaggtatgcggcaccctcggcgccttctgcgccacgctgggcgtggtgctgccctccttcctggtgatctacgccgtctcctttgtgctgcggcagttctcggacctggcggtggtccaatacgccttcaacggcatccgggccggcgtattggccctgcttttgaaggcactgctgtccatgtaccggcagagccccaagggcgctgtttcctatgccgtcatggcgggtgcctttgtgctgacggccttctgcggcgtggatgcggtgctggtgatcctggccagcgcgacggtggggctgctctccgcccgcatggcgaaaaggagggctgtgtgatgctgtatctggagctgtttttgaccttcttcaagatcggcctgttcaccatcggcggcggttatgccatgctgccgctcatccaggcggatgtccaggccaagggctggatgacggcggaagaattggtgaacttcatcgccgtcagcgagagtacgccgggcccctttgcggtgaacgtctccacctatgtgggggcggagctggcgggcctgcccggcgccttctgcgccacgctgggggtggtgctgccctccttcctcataatcctgctggtggcccggttctacgccgccttccgctccagcgccatcgtcagcggcgccatgggcggactgcgtccggctgtgatcggcatgatcggcgccgcggtggtctcggtggggcagacggtgttcctgccggagggattggcggcggtgacggcgtatcccctggtctgctctctggccatcttcgccctgatggcggtcctgacccacaagaagctccatcccatcgtcatcatcctgctgtccgccctgctaggcatcgtcaccggctacctgcagccggcgtgactccggtccgtcgccccggaacggggcggcgggcttttttctttagccggacaaaagactttctaaaagcaggatttcccctcttgacttggagtgcgctccaagtgctatccttttcatagagggattccgcccaagggcgggccggggacttcccactgtggaggcacctcgtctcccggagaaggcagtatccccttcctaaatctgaaaaggagaaatcgtgatgatttacaaggactttcaggacctgaagctgtccgctctgggcatgggctgtatgcgcctgcctgtggtgggcggcaacgacgccgtggtggacgaggccgccgcggaggagatggtggattgcgccatggccaacggcgtcaactactacgacaccgcctgggggtatcacaacggcaactcagagattgccctgggtaaggccctggccaaacatccccgggaaaaattttacattgccgacaagttccccggttacgacctatccaacatgcccaaggtgcaggagatttttgaggagcagctgaaaaagtgccgggtggactattttgatttctatctcttccacaacgtctgtgagatgaacatcgacgcctatctggacccgcagtacggcatccacgactatctgatggagcagaagcggcgcggccgtatccgccacctaggcttctcctgccacgggaacctgcctgtgctgaagcggtttctggacgcctacggcaaggatatggagttctgtcagctgcagctgaactacatcgactggaccttccagaacggccgcgaaaaggtggagctgctggatagctggcacattcccgtctgggtcatggagcccctgcggggcggccgcctggcccgcctttccgacgaggaggccgcccccctgagggccatgcgccccgaggaacccatcccggcctgggccttccggtttctgcagtccattcccagcgtcaccatgattctctccggcatgtccgacctggagcaggtgaaggccaacatcgccactttccagatgggggttcccctcagcagcagggagatggaccgcctgctggcccaggcccagcgcatggtcagcaagaccgcccttccctgcaccgcctgccactactgcgtcagccactgtcctcaggggctggatatcccctccctgctggcgctgtacaacgagcatgccttcaccggcggcggcttcctggcccccatggccctctctgctctgccgcaggacaagtggcccagcgcctgcatcggctgccgcagctgcgaggcggtctgtcctcagcaactgaagatctccgaggccatggccgactttgcgtcccggctgtaaaatctgagacagaagcgcccccgccgggaactctccggcgggggtgctcgctctcacggagtcttgacggtgtccgggaatgcggcccggatggcctccggcagatgggcggggtccaactgttcccggccgcaccactccgcaaagcggtggaccgcctctttgtccggcgacagcccggggatgacggtcagcgccaccgtccgttccccctccagcttccggaccagaatgccatacacacaagaacagtctggtcggaagctgcggacgcgcaccggcgcataccggtagccggtcatgccgcctgccctccgggagcagagaaacgcatagaggtcacagccgtaaatctctgccatgcggacaaccatgtcgaacctgggctgcgcttttccccgctcatacttttgcagtgtccgtgtggaaattcccaggcgttccgcagccttttcctgggaaagtcccgccagtctccgctctctccaaaaggggctcttttcctggatgtgtcttttttttttgatatttttgcatagcaaaccctccttctacggaggattttacattatcttccaaatttttaacacgaataaaaattcacttttggaaaaaaattgccgaacaatgtcgaatttcgtcgatttacccaaagaaaatacaggccccgcatattcatacggggcctgtgctcagacaaatccttccagcttggcgatccggtactccagtacggcgaactgtcggcgggtcagcggctggtccaacatcaggtctccctccgcatttccctgcatgatgccgttttccgtcagccagtccacggcggccctggcttctgcctggtagtccgtctcttcttcggtctccacccaggggatgcccaaatactccagaattcccttggcctctgccaccgccagcttctggcggtagtcggcctgccccagcagggcagcctcctcccggttggtgtggaagccgttttccagcaggacggccggggcctttgtgtgcttcagcacatagagctccggatcgtacacaatcggcgtggatcgcacggcgatgcccgccgcccgcacctgctccaggatgtcctgagccgcccgctcccggtcgccgccggggccgtagagatagacgctccaccctttggcagaggaccagccgcccccagcggcggcattgctgtgaaggctgacgaacaggtccaggtccgggatgctgttggcgatctcacaccgtctggccaggcttactgccccgccgccagtacgggtcatggtcacggagacgccccggtctgtgagcagcttctccagccgcttccccaggtccagggtgaatacatgctcataataggtcccatccggactcttgttggccagattgcccgcgtcatgccctggatccaggcagatgtgcttttctcgttcgctcaaatgcgtttcccccctctgtacaggctcggggaacacagggctccccttccagtttagtggaagggcgcccgtcctgttcccccgccggggtcttttcggagcggggcgcatatcatggagcaaaatcatccgaaacagggaggggtccccatgcctgccgctctgattaaacgtctgagcaatcttctctgcgtcaaaagtattgtgacgctgatcctcaccgttgtatttgccgacctagccgtcaccggccgtatctccagccacgattttctgactgtcttctccgttgttatcgccttctatttcggcacgcagagcgaacgcctcagcggacagctggagaaagacaccggacagaaattgtcctgaccgtcatcccagggccacgtccagcaccatcatcacgctgaagcccgcagcaaaggccagcacaccgatgtgggagtggcgtccctgggacatctccggaatcatctcctccaccaccacataaagcatggcccctgcggcaaagcccagcagatacggcagggcgggcaccagcagctccgccgccaggatcgtcaccagggcgccgatgggctccacaacgccggatagcacgcctccggcgaaggcccggagcttcccctcgccctccgcccgcaggggcatggagacgatggctccctccgggaaattctggacagcgatgcccagggaaagcgccagcacgcccatagcagtgatctccgtgtcccctgccagatatccggcgcagaccacgcccaccgccatcccctccggaatgttgtggagcgttaccgccagcaccatcatggtggtccggcgcagccggctggaggggccctccggctgcgcgctgccccaatgcagatggggaatgatatggtccagcgccagcaggaacagaaagccgagccagaggcctgcggcggccggtgcaaaggaccactttcccagctcctccgaccgctcaatagccgggatcagcaggctccaaaccgacgccgccgtcatcacccctgccgcgaagcccgtcagccccttctgcaggccgtccgacatcgcctttttcataaagaacacgctcgccgcgcccagggaggtgcccaggaacgggagcaggagtccgtataatgcttccataatccatcctttctcatcttgtgtccggaatcagtatccatgcgttcagaataccggattcccgcaccggtgtcaaattcattttcccaccggatggcctttcacaaatccggaaaatcgctgccgctctggacagcagggagcaagtctgctatgcttgacacaggggacaggctgccggatggctccgtttcccctcatttcaggctcattttagcttttgggtgtaccatggtcccatcatcagagaaccatcccggaataggaggaacgccatgagggtctctcaccatgtaaaacggtcggtgtgcctgctgctctccctgcttctgctggcgcagggcatgaccctgggcgcagccgctgtgggcaccgattccgtcccggcggggacatccgttctggagcccgccgcataccccgacagtgaggttctggtcctgtatgaggacggcaggaccgaggtggtcgtctacgaggacgccgcctccctggaggaggggctgccgcagctggcccggcaggagggtgtggcgctggtccagcccaactacacatacacaagcaccgctctctccaccacagacccgctgctggcggagcagtgggccctgtataacgacggcagcttccaactggaggagcaggagaacccctatccggtcttcaatgatccctttgcactcccctccgccccgtggcagtggattgccccctggtggatgcagtccgatgcatccgccgggagcaccggaaccgtgcaggccgcggccggcgtggacatcggcgcggaggatgcctgggccctgtacgacggcggaagccgggatgtggtggtggccctggtggacaccggcatcgactacacccacgctgatctggagggccgcatctgggtgaacgaagacgagatccccggcaacggggtagacgacgacggaaacggctatatcgacgatgtctacggctggaatttctactccggcagcaatcaggtctatacgggcagtgaggacagccacggcacccacggcgcgggcaccatcgccgcccatgcggacaacggcatcgggatcgccggcatcgtccggagcgaccacgtcaaagtcatggcagtcaaggctctgggcgggtgggacggcagcggctccacggcgtccatcatccgggccattcagtacgcggaggccaacggagcccggatctgcaacctgagcctgggctcttccagaaacgaccccgcgctgtaccgcaccatcgcggcgtcggatatgctgttcgtagtggcagccggcaacgacggcgccgacctggagcttgcccccagctacccggccagctaccacttggataacctcattaccgtggcgaacctccgatacgacggtaacctggatcctacctccagctacggcgcctcctctgtggacctagccgcccccggcacccatattttaagcaccacccccgggaattcatacagttacatgacaggaacctccatggcggcgcctatggtcagtgctgcggcggccatgctctactcccagtttccggatgccacgctggccgacgtgaaggacatcctgctatcctccgtccaaaagctggacagcctcaccggcctgacggctaccggcgggatgctggacctgggtgccgccatggcatccggggccgcggcccagaaggggcggacctggacggagccggacctggcggcctataccgacagtccgcccattctctccctgtctctcttccagtggagggggcagcagtatctgaccgttcaagtccaggatccggacggcgacttccgctccgccgcttatgccgccgggacatacacggcagcgaatttccagggcggcgccgcggggacgcccctccccttgaatgcgtggggggccgccaccttgctggtgcgcaatggcggaccttataccttttacgcggtggacctggccggcaatgagacggtccgcacagtggatctgccccggagcccctgagggcggcccgccgccaactccatccccggtcaaaaggactccgcaggctgtgcctgcggagtcctttttcctgctccggaaaagcggcccctccatcagtccttcagaatgtcctccagttccctgtccatcgtcacggtcatgcgtggcagctcatgcagtcccttccccaagtcggctgtgccgtgtctggtgaccgcagtgaccgggaacagctcatgcacaaatgcctccgcgtccggctcggtaatgccgaagggataggcgaagaaggtgacgggctggcccacctcctgggcaatgcggtcatggctcttctgaatatcccccagcaccctggcctcaaaggcactgtccgactcctccggatccctttggatgccgttgatgccgcccgggtcaaagtttccgcccagatctcccagattgtggagcgaataggcatgggacccgatctctaccaggccggagtctgccatctcccggcacatatcccagctgaggaagttgtcagcggacacgtcctgcatatacaccataatagagaccacggctttcatctggtatgcctgaagcagcgggaagagcagctcgtagttgctccggtatccgtcgtcaaaggtgatgagaaggggtttttccggcagcggctctccccctgccaactcccgcggcagcacagtgtggtagccatgttccgtcagccagcgcaggtcctgttccatacggctcacggtgatggtcatatcgttgcacggctcaccgtcctccacgatatggtggtacatcagcaccgggagggcccggtccgccggaatgggcatctgccacactcccctggcatagagatagacggctcccgccgtgaagcagagcgccgctgcggcggccactcccaggattcccacccgaatttttttcatctgtctgtcatctcccatgtgttggcgctgcggcgtatacccttagaaaattcgcaaatattattttatcagattaagttaaaatgtcaattcattaaatgaaaagattatctttgctaggatgttttagggtgattacatgcctttggattatgctgcgattggtggccggctgcaggcgcggcgaaaggaactggggatcacacaggaggacgcggcggaacgggccggcattactgtggtctacctgtccaaaattgaaaacggacgggtgcatccgacgctggacctgctggacaggctctgctgtgttctggaatacgaccttgcccgagccttcaccggcgtccagacgacctctcccgactacggtcaggagcaggtgctgcggcttttcaacgcctgtgcgccgcgtgtcaagcctgttgttctgcatctgctggagcagctggcaaccttaacgtgagcagaagcgggaaaagtatgcaccatgtctgtcccgcaaaaaagcggcgccccggcggaatattccgccggggcgccgctctggttttttccaagtctgtgccggataccctccattccctgcggggtggcggcaagggaccagcctccgcacactggcggaggccggtgttgaagccgttatgtttcctcgtacagctcaatgatggcgtcatccagggtgatgaacgccagtcggaccgtatcgctgagggtctccggcccgaaaatcacctgctgggcctccttcagataggggtccatgttatccaccttgtaggccacgtggggctgtttggaaaggatctccgggaaccgggttccctcctcaaatttcaggtattcaatcttgtagtcgtaggcatccacgctctcattgacccagaagccgccccactcgttgtagaccatgttgggctttttgttcagcacggggatcccgatatgcatatactccgctgccatggaaaacctcctgtcagttatcctgggcggccaactcctgatagaactggaaggcctcccggtcagtaaatttctcgtgcacgatcttggccaccgcccggcacatggcggcgggatgctcactctggaagatgttgcggcccatgtccacgccccgggcgccgtcggagatggcccggtaggccatggtcagggcctcgtcctccggcagcttcttgccgccggcgatgacgatgggcacgggacaggcggccactaccttctcaaagtcatcgcagtagtaggtcttgacgaaggacgcccccagctctgccagcatccgggcggccagcaggaaatactgggtggtgcgggccatctccttgcccacggcggtgacgcccagaacagggatgccgtaccgttccccggcgtccacggcgcggcacagggtctccagggaccgggcctcgcccgccccgccgatgaagcactggatggccacggcggaggcattcatgcggatggcggcctccatatcggcacccacgccgttgccggtgctcatgtcgtcgatgagcacactggcgtcatgggtggcccggaggcagatggcattgtggaccgtgggggggatgcaggagcggatggcccccgggtggccatgagcacgtccgcgtaccggcacagaggggcgatggtcacgtccatgcgctccaggcccgcagtggcccccatgatatagccgtggtcaaaggccagcatcaccgtgttgccgctcttgggattgaacaggtgggagagccgattcttggctccccagtccccgtggcccaggcccttggcgaagaagccctgctccggggcaggcacgtccagatggtagtcgtgggcggtcttgtttccgattgcgtctggcatagcgcttactccttactgaacgccggggtgcggcagggggtgttccacagacggagcatctcctcgtcccacttggcgatgttcatctgaaagcctgcggcctcctggacggtgaggatctcacccaccatgctggccacgacctcgatgcccttggccttcaggaactccacagtgtccttgaacagcaccagcatctccatcatggtggtggcgccgcagccgttaatcatcacaaaggtcttgtccccgggcttcaggtccagggccttgcacagggcctcggccacggtggccacggtatccttggaggacatcatgggcacccggacgccgccgccctcgccgtgttggccggcgccgatctccatcaggtcggtctctcccaggtcgccgaaggacatgccgttctggggatgggtggcatcggtggacttgacggtgatggaggccatgttgtccgcgtaatgttgagcgatctccgctacctcctccagagtcttgccctcccgtgcggcggccgcggcgatgtggtacagcgccaccgcgccggccagcccccgcttgttgtcctcgccgttggggtcgtaccggatctcctcgccggtgaccacctgacgcacattgaggccggccttcctggccagcttcatggcctgcttgcccgccagctggtcgccggcgtagttcagggtcagcagcagcacgccgtggcccttgtccgccatcttcatggcatcaaacaccagctggccgttgggggcggcgaagatatcacccaccgcctggatgtccagcatacccttgcccacaaaaccggcctgggcgggctcatggccggagccgccgtaggtgacgatggtcacccggtcggcattggccagatccttactgatgaccaggtggccgtccacattcagaatgtccggataggccagacccaggcccaccagctcttcgtcggtgaccgtctccggcgcgttcatgaacttcttcattttcatacagcattcctccagtgatatttaagtggtgcattgccaatcccgctcctgcgggtggaacaacaggttattcccgggccagcccctggaagaaccaggacatggatacggcgcccgcgtccggggtgccgatggtcttggtcccgtaactcttggcccggccgaatttggagacatactgcttcgtagcctccgccccctgggcggcggcctgggccgcggcatcgaacagctcgtccgcgctgtctcctgtataggccgcgacggcttcgctggcggggatcagggcatccatcatagtcttgtcccccaccttggcgccggacatatcttccagctcctccagggccttggcgaagatggccttgaggcccgccacgtcgatctcctccccctctggggcctcctcctgcaagccgtccagccaggtgttccacagggggacggcgctgccgccgttcagggtcataacggccatggccgcgtcatccagcatggactggatcccccctcggcggcgtccactgcttcggagatagccccggcaatcttcgccatggtcaggccgtgatccgcgtccccaaatttggaatcgatctccgtcagctccgcctcagcggcggtcacagcggcgcaggcgtttttcaggcgcgccgcaaattcagctcttgtcatgtgatatcggccccctcttttgacaaaataaacaaattttggaagacatctttattctaacatagtcatttcgctttttcaaggcgcatcgcccctcttttctcccggccagcagggactctccgacggcctttccaccccgcccttcattgacggacagaattccctattttgtgtgttttgtatatggatttcccatggcgattcttgtaaaatacaattgttgaaaaatgcaacgataggagaatggtatgccgaatcggatcgagatgtttcgccgcctggagcgacagtattttcgggacaggcttggcaccctgggcctgcagcagctggacggcatgatcctgcacctgctggggcgggagggccacatgcggcaggaggacctggccgtccagctggcggtggacaagggggctgtggcccggagcctggcccgtctggaaaagcgcggcctggtggagcggcaggtgagcgcccggtgccgccgggagaagcatgtctctctgactcccgcgggggagggcgcatatcagggcgtccagcggattctggaggagtgggggcatgtcaaataccagggcttcacccctgaggagcgcgccctgaacgaggcgtttctgacccgcattgcggagaatgtgatcgaattttgtcgaggagagggaagtgaacatggttaagaatctgacggagggcagaccgctgaatctgctgtttttctttgccctgcccatggtggcgggcaatctgttccagcagctctacaatatggtggacaccgcggtggtgggaaaatttgtgggcgaagacgcagtggcggccgtgggctcctccttccccatcgtgtttttgtcggtggccgtggcctccggactgtccatgggctgtacggtggtggtgtcccagctgttcggtgccgggcgcatccatgagatgaagaccaccatctccaccgccatcatctctctgggcgtcctggggctcctcatcatgggcctgggaacgctgctggccggtcccctgctgcagctgctgggcacggacccggatatcatggccgactcccggacgtatctgcagatctatttcggcggcgcggtcttcctgttcctctacaacactctcaacggcatctataacgcccagggggacagcaagacgcccctgatcttcctgatgatctccagcctgacaaacatcgtgctggacctgctgttcgttatccgcttcggcatgggcgtggctggcgtggcgtgggccacgctgatcgcccagggcctctgcgccgtggcctccctgctggtgttgctccgccggatgcggcggatgccctgcgagccggaaaaacagggcgtgaagctgcccctcttccacatggtggcggtgaagcgtatcgcccagatcggcctgccctccatgctccagcagtctctggtgtccctctccatgatgatgatgcagggtctggtcaactccttcggcaaagtactggtggccggatacactgctgccacgaagatcgactccctggccatgctgcccaacatgaacatctccaacgccatgtccagcttcacggcccaaaacatcggtgcaggcaagtacgagcgggtcaaggagggcctgaaggcctgtctgctgatggtggcggtattctctctgctgatcaccgtcatcatcttcctcttcggaaaccagctgctatccctgttcctggacccgggggacgcctcgggcgccatgggctacggtctggcctatatgcacacagtctccctcttctatatcctgatgggcctgctgttcgtccccaacgggatgctgcggggcgcgggtgacatggcagccttcaccttcagctccatggccaacctgttctcccgggtgggcatcgcctacgcactggtgtatctcaccccgctgggggccaacgccatctggtggtccatccccgccggctggctgatcggcgcggcggtctccctgctccgggtcaagagtggaaagtggatgcgcaaggctgtggccgaccgctgaccctcgcaggcggtctatttcaggaatcgcaggtgctgtggatatgaacaggaaacagaatctggaggtctttgcgaagacacccgtccgaaaggccgtgctgctgcagatagtcccggccgtggccagtcagatggtcacgctggtctacaatctggcggacacctactttgtggggatgttgaacgccccccatgaaaccgcggccgtcactgtggcctatccctcctttctgatgctgaccgccatttccaacctcttcggcgtgggcggggccagcgccatcgcccgggccctgggccgtcaggacgaggagggcgcccggcggatcgccgctgtctctctggccggcggcctgctgtccgccctgctcttctccgcggtgttccgactgctggccgatcccgtgctgcacctgtgcggcgccaccgaggctacctatgctgctgcctacggatacgccaaatgggtcgtcatactgggcggccccttcaccattctcaacaccctcctggcgaatctggtccgggcggagggcggcgccggagccgccgccttcggggtctccttcggcggcgtcctgaatatcctgctggacccgctgttcgtcctgccccagttcctgggcctgggcgcggtgggcgcgggcatggccacggccctctccaacggggcggcggtggcctgttttgccgtctatctggtccgccgccggggcgccacctatttgaacctgctgccggcgaatctgcggtatgccgcccagtacctgcgccccattctggccatcggcttcccctccgccctgcagtatgcgctgacagtggtggccaccgctgcccaggccgactttgtatcccaataccccacagaggcggtggcggccctgggcatcgtaaaaaaactggaccagctgcccctgtatttctccatcggtgtctccaacggacttctgccgctgctggcctataaccacgctgccgggaatcaccatcggcgtgcgcaggccttccggatagggagcctgatgtcctttggcttcgccgtgctgtgtctggtctgctatgaggcgtttgccacccccctggtctccctgttcattgccgatgctgcgacagtccgctatggggccgtgttcctgcggtgcatggtgacggcaatgcccatgatggccctgtgctatcccatgatcatccagttccaggccatgggcagggccagggagtccctggtctgctcgatcctgcgcaagggtgtactggacattccgctgctctatctcatggacgcgctctttcccctgtacggctgtatgtgggtgcagcccatcgtggacgccatctcgctggccgcagccctgtggttttaccgggccatccaaagggggagcgcggcgggcggaacggccccagccggggcctgaaaccggcgtgagcaaaacggaactgtaaggaggagaacgaatccgtggcaagcaaggagcacgatttttccgtcggcagcattccccgcaacatcatttcgctggcgctgcccatgacggctgcccagctcatcaacgtgctgtacagcgtggtggaccgcatctacctggggcggctccccgggcatctggctctgacgggcctggggctgacgctgcccatcatctccatcgtgatgggctttgccaacctgtgcggcacggggggcgccccctgtgctccatctaccggggcaagggcgaggaggaagaggccgagcggatcatgggcaacgccttcacccttctgctgattttcggcgccgctgtcacaggggtgttcctgctgttccggcatcccctgctctacctgttcggcgccagtgacgccacctatccctatgccgaggcgtacatgaccatctatctgctggggaccgtctttgtcatgatcggcctggggatgaatcccttcatcacgtctcagggcttcggccgcaccgggatgatgaccgtgggcctgggggcggtggtcaacatcgtgctggatccggtcttcatcttcgccctggacatgggggtgcggggcgcggcgctggccaccgtaatcgcccagggctgctccgccgtgtgggtactgaaattcctcaccgggcggaaggccatcctgcggctccgcctgcggaatctggcgctgggcgccgggcgggtgaaatccatcgtggccctgggcctgtccggcttcttcatgaatctcaccaacagtctggtgcaggtggtgtgcaacgccacgctccaggcatacggcggcgacctgtacgtaggcgtgatgaccatcatcaactccctgcgggaggtgttcttcatgccggtgcaggggctcaccaacggcgcccagccggtcaccgggtacaactacggcgccggccgatacagccgcgtccggagctccatccgcttcagcgtggcggtgacggttggttacgccgctgtcttctgggccgccgccatgttgttccccgggcttttgatccgggtcttcaacagtgagccggaggtggtggctgccggcatccccgccctgcgcatttacttctgcctgtttatccccatgtccctccaaatggcggggcagggtgtgttcgtgagcctggggcgctccaagcaggcggttttcttctctctgctgcgcaaagccatcatcaatgcgccgctgacggtcgttctgcctatctggatgggcaccaccggcgtattcacagccgaggccatctcccagctggtaggcggcctggcctgcagcctcaccatgtatttcaccgtgtaccgtcccctgggccgcctgccggaccgcccgccggagaacatctgagacccggttgccgcgccgttgttccctctcttactcccacagactcgcaagaaaaagcggaggcgcttttggaggtttttccaaaagcgcctcctctgcctgttccggccccctgcgcgtcttgacaaacagttccggcccggctataatcttccccgcaagtcccggccgcccctctgcgggaggttggaagatcccgaacctgttaggagcaccgccatatcatgagagcatcctctgcatacagcctctttgatacagagagtgtctgggccatcctgatgcggatcgcgcctccggtcatgctggcccagctgatccaggccatgtacaacatcgtggacagctattttgtgggccagttctccagtgacggcctcaccgccctctccatcgtctaccctgttcaactgatcgtcaccgccatcgctgtcggcaccggcgtgggcgtcaataccctgatgtcccggtacgacggccaggggaaccaccacctagccgaccggaccgccggaacagggacggtcctggcgctgatcagttggctgatcttcgccgtattgagcggcctgctgatgcgcccctttgccgcgatctccacggagtcctcctccgtggcggaccttgccgtgacatacggtaccatcgtctgcgtgggcagtccgggtgtgtttctggagagtacctggagcaaggtccaccaagcccgcggcaacatgcgcctgcccatgttggcccagatcgccggcgccgcggccaatatcgtgctggacccgattctgatcttcggccttggcccggcaccggcgctgggagtggccggtgccgcctttgctacggtgtcaggccaggtgctggcggcgctcattgttgtctccggattccggaagccgccccccatccgggtgttccgctcctatgcggccaagatctaccggttgggatttccctccatcttcatgcagcttctgttcacggtctatatcatggccctgaacatgatcctggccggcttttccgatgacgccgtgacggtcctgggcctgtattacaaggtgcagtccttcttcttcatccccctctccggactccagacctgcatcgtccccctgctgagctatacatacgccaagggtgcctacggccgctgccgccgggtggtgaagaactccgtcctgctggccatgtccttcatgctggtggggatcgcctgcttcgagctgatcccggaacagctgctgcgcattttcaccgcggagcccgcggtcctggagatcggcgtccaagccttccacatcatcggcatcagctttctgcccgccgtgccctccctgatcctgccggtctttttccaggccatcggggcggcgctgcccagcgtcctgctctccctgaccaggcagatcttctgcctgattcccgtattctggctcttctccaggatcgatctggcctacacgtggctggcctttcccattgcggaagtcgtgaccggaacgctgggcctgtgcttctatctccaccgcatccacatctgggaccgctgcaagggcgcggccctgaaacccgaacgcaaaggagcgactgccatgaaactcatcaccgccatcgtcaacagacgggacaccagcgaggtctgcgccgccctgacagacgccggcttttacttcacccgcatggcctccaccggtggttttctcaccggcggcaactccacgctgctgatcggcacagaggaggaccgggtgccccaggccatcgccatcatccgccagaactgctcccgccggacggagaagatctcctccaacgtgcagctggccacgccctctgcggcctatcccacggaggtgaccgtaggcggtgccacgctgttcgtctccgatgtgacgcagtttgaaaagatctgagccgcccgccatatccggcggccgggcacaagcaggacgaagcgatccccctcagtgtgtgcactgagggggatcgctttttgcatcaagatcgatcaggcaggggcgaacgccgcgcccggagacgcggccacagtcccatcctcccgtacggccacatattcgatcatctcgccgctgtccctgcgcagccggtccaccagaacgccgccctcctcttcccccaggatgaaaaaggcagtggagagcaggtctgtgtaaacaggccgcgaggacaggatggagacgctcttcagtgtcagcggcatggggtacccggtccgcgggtccagcagatggtggtacacggtcccattcttctggaagctgtgctcataccaggaggatgtggcgatgcccgcgtcctggagctgcaccgtcccaaacaccgagccggtgttgtccgggtcccggatcgccaccttccacggccgggtcccgccctgcgcgtcctggtgcgcgccgatcacaaacaggttcccgccgtagtccagcacggcctgccggacgccgccctgccgcaggcggtccacggtcagacccagggcgaagcccttcccggctgcgcccggatccaaaccgattccagaaagatcaaacgtcacggtccgcgtattccggtccaggcggacgtgctgatagcccacccggtccagcaccgcccggatgcgctccgcagaggggatccggggcgtctgggacagaaaatcccacagctttaccaccggccccaccgtggggtcgaatgctccgctggacaggcggcagatctccaggttctgctccaggaaggtgtacagggtctcagagaccggcacagcctcgccgggccggatgtcccggcagagcctggaaagctctgagtcgggatcgaacatgctgagggtgcgctccagcccgtgggcctcctcctcgcactgctccagcagctgctccccgtcctccgggatttccgccgcgatgcggcagagggtgtcgtacgccaaaaatgcgcgggtatgctccataacggttttcctttccggttcttgtctttactggaaaacgccgtccttgcgcatctcctccaggacaaccttggccatccgcaggtagttgatgaacgcaggatacatcggccggttcttgggatccatatccagatgcgcatggtctgggttgggattgtcccagatcatgcccatatcccgtccggcggcgtggggcaggccggtcagatccagcatgttctgggtggcgcagaccttcaggttcaggttgtccatctgggtgcggaagcccaccaggaaggcgtggcggtcccagccggaggggaacggatcctcataggcggggcagtcgtatttggactggcggtagtactttttcagctcggggtggacgatgtcctcctcgttgtctgcgaagatctcgtcaaagcggcaggagcggatcctgccgttctccaccaccaccttcagccagccggtgaggccgtagccatagtcctcggaatagctgtacagcttcttggaggagggctcgtccagctccttgtccagcttggccgcgaaggtcagcagcttcttcacgctgccggaggcgctggccaccagatcgaagtctccgctcaggctctgtttctccagcatctgctgctccacgtactgcatacccatggtcagcacggagccggccttctgcatccggggcttcgtgtactgccagaagctgtagctggagcggcgcttggagatgccctggtacaggtggttgtaataggagggagccgtgatctcattgagctccacaaagatcagcttgccgtcggccttcaccgcctccacaatgcccaggtgacccggatcggcgggaaactccccctctacgccgggatagtagggcgggaaccgttcctcgatccgatagtagtcacccttcagcatccccttgggggctggacggaccagacgggcttctttcctgcgttatccatgttcgttcctccttacttcacggcaccgtccttgaccatctcgtcgtgaacgatcttggccaggcgcagatagttgttccacacgggagagcggggccgggtgacagaacgggcggtggcgtcgctgttggagacgagtgccacatcgtccttgtggggcttgtcccacaccacgcccatgtccgggccctccacgcagggcagtccggtgatatcgaacatatcctgtgtttcgcagaccttcttgttgatggcatcggactggtccttgaagcacaccagccaggcgtggcggtcccagccggaggggaacgggtcctcataggtagtggagaaatacttggactgacggtagaactgcttcaggtcgtcgtaaacaatatctttggtgtggtcggcgaagatctcatcgtagaagcacctaacgatcttgccgtcctccaccaccacctggagccagccggtgataccgtagccgtaatcctcggtgtagccgtagtaccgctgcttcttgtggttggagtccttccgctgagcggacacgtcgtccttcaggccgatcatgttcttcatggagaaggaggcaccggtcagtaggtcatagtcagcgtccaggtcctgcttttccaggatctggtcctccacatatttgaagccgttggccagcacccgcccataggccacgctgcggcgcttgtcatggaagtcctggaagaactggaactccgtgcggcgcttgctgacattctggaagtggcggacatagtagttgcccatggtagtctcgttgaactcggcgaaggcgatcttgccgtcgtcgtcaaacaccacgtccagctcgcccttgtggccggggtcgccccagcggccgctgtaccgcagctcggcgtgatagtaatcgcccttgaccaggcccttgtactggggctgcgccgtccagtcgatcagctcgctctcgttgtcctcatgccaggggcccagccccagccatctcgtcttgtcaatcatgtcaaattcctccttatgattctgtccgtcacttggacggggtttgctcttccagggcgccggcccggcagcaggcgcagaagtggccgctgccgaagtcccgcagcgccaggtcccggccggtgcagccctcccgggcgtacaggcagcgtttggcaaagcggcagcccggctccgggtcaatagggctttgaagttcgccgatgagcttcacccgctgcattttctgccggctgctggggatgggaatggcagacagcagagcctgggaatagggatgcagtggctggcggaacagctccgcggaatccgctgtctccaccaactggcccaggtacatcaccgcgatcttatcggagaagaacttcaccaccgacaagtcatgggtgataaagagataggtcaggtggaactccgcctgcagatccttcagcaggttcaggacctgggcctggatggacacgtccagcgaggacaccggctcgtcgcagacgatgaactggggctgcagggacagcgcccgggcgatgcccacccgctggcggcggccgccgtccagctcgtggggataggcgttgaacagccgggcggagaggcccaccacgtccatcagccgggagacctccttatccagctccgcacggctttgggcctttgcgtgaatccgcagcggttccccgatgatctccccaatggacatccgggggttcagggaggagaacgggtcctggaagatgatctgcagatccttgcgcaggtcgtgaagctgcttcttattcatcttgcagatgtcctgtccgttgaacaagatctcgccgctggtggactggtgcaggcccaagatcagccgtccgatggtggacttgccgcagccggactcccccaccaggcccagcgtctcgcctctccgaatggaaaagttgacgccgtccaccgcatgaagggtgccggtggggcttttgaaatacttcttcaggtcccggacttccaggatgatatccttatctgccatgtcgcacctcctccatcagttcgggggattcgaaaacgccctggtgggccaggcagcgcaccatctgggtgccgccgacgccggtcatctccggcttgcgggtacggcaggcccccgttgcgtaggggcaccggggtgcaaaggcgcagccctccggcagctccgtggggtccggcatctggccctggatgggcttgagcttctccgccgtctcatccagagacgggatggagccgaagaggccgatggtgtagggatgatgggggtggtcaaacacctccgcgatggtgccgctctctacgatctcaccggcatacatgatagccacccggtcgcagacctgggccacgacgcccaggtcgtgggtaatcagcagcagggaggtacggagcttttccttcagctcgttcatcagttccagcacctgggcctggatggtcacgtccagggcggtggtgggctcgtccgccagaatcagctccggcgagcaggcgatgctcatggcgatgaccacccgctgcttcatgccgccggaaaactggtggggatactcgtcatagcgggcccgggggatgcccaccatctccagcatatcgccggcctttctccggccctcctccttgctgcacttttcatgctggtggatgacctccgcgatctgatcgcccacggagtagaccgggttcaggctggtcatagggtcctggaaaatcaccgagatcttgctgccgcggatctcccgcagacgggcgggcttggcctggagcatatcctcgccctcgaaccagatctcgccgcccatgatctttcccggcgggtccgcgatgagccgcaggaccgacagggccgtggtggtcttgccggcgccggtctcgcccaccagacccaggctctcgccctttccgatggtcaggtccaggccgttgacggcgtagaccacgtcctcgtcggtgtggtactccacccgcaggccgcggatatccagcagggcctccggggcctgcgcggaggggatgggctccgtctctggcaaagcggtcttgtgctgcttgttctcttccatgtggcgtcctccctcctcagttcttcagcttggggtccagggcatcccgcaggccgtctcccagcaggttcagggagaggatggtcaacatgatggcaaagcccgggaacgcgcacacccaccaggccgcccggaaatactgccggccggtgctgaccatagaaccccactccggcgtgggcgggctgatgcccaggccgatgaagctgaggctggcgatagccaggatggacccggcgatagacagcgtggcctgcacaatgatgggggccatgcagttgggcaggatgtgcttgaggatgatgcgcttgtcgctggcgccgatggcgcgggccgcctcgatgtactcctcgttcttgatggtcagaacggcggagcggacgatccgggcaaagggcgggatgttggagatgctgatggccagcatcatattcgtgacgctggtgcccatggcggacaccagggcgatggacagcaggatgctggggatcgccaggaagatgtccatgacacgcatgatgacatcgtctacccggcggctgccgtaaccggcgatggcccccagcaggccgcccaccactgtggcaatggcgatggtggcaaaggccaccggcagggagatccgggcgccgtggacgatccgggccaggatgtcgcggcccacctcgtcggtgcccagccagtgctcgacggaggggggctggagcttcagggatgcgttctgctgaatcaccagcgtctcgtagtcaaaaaacacatcggcaaagacggcgaagaagatgatgacggccagaatgatgagtcccagaacggccatcttgtttttcttcaggcggcgccatactgcggcggcctgggactttttcttgttcttgtttttcactttcccagtcatccgcatcacctctttgccgttttgtactgggcccggattctagggtccaggaatgcgtacaggatatcaatgcacagattgatgatggtgaacatcgtggccagcaccaatacgcaggccaccaccacgggcgtgtccttcaggccgatgcagtccaccagcagccggccgatgccgggccaggagaacaccgtctccaccagcactgcgccgcccagagagaagccgaattgcagtcccactgtggtgacaatgggaatcatggcgttgcgcagagcgtggcggatggtgatgacgctctctttcaggccctttgcccgtgcggtgcggatgtagtcctgccggatcgtctccagcatggaggagcgggtcatgcgggtgatcatcgccagggagttggcgctgagggtgacggccggcagcaccagagcgccccaggtctcaaagttggaggatgggaaccaccccagccccgctgcgaagatcacgatcagcatcagccccagccagaagttcggcatggagacgccgaacagagcgcccaccatggaaatgttgtccaccgccgaatactgatgggtggcggagatcacgcccaggggaattccgatcagaatggcaaaaagcatggcgcaggccgacagcaggatggtattgggcagccgggcggcgatctccgccgccaccgggttgccggtgctgtatgaggtaccgaagtcaccgtggaccgcgttgatgataaaccggccgtactggaccaggaagggatcatccaggcccagctcctcctgcatggcggcgtaggattcctcggagtagttgtcgcccagcatcatctgcaccgggtcgccgggggtgaagctcaggatcgtataaacgatgaagctgacacccagcagcaccggaatcagcatgagcagccgtttgagaataaaacggtacatctgtcactctccttttccataacgcaaattcgcgcaagcggacggcggcttttgccgccgcccgctcactggaatgcctgaatgcgcttattcaaaataggtgccgttgatgtagtgggacttgcccggatacaggccgaatcccttcacattggactgcataccggcgttcaggtgctccaccgccatggggaccaggggcgcggcctccgccactttgctctggatctccgcatacagctccatggcgtgctcggtgtcggtggtggtgctggcctcatcgatcaaggcgtccacctcaggcgtggtccagaagcagcggttgccggagggccccagagcctccgtgtggtacatggaccgcagcatggagtcggggtcaatggaggtcttggacatgatgaacatatcatgggcgccgttgccggtctcagactggaactgtccgctctccagggtcttgacctcggcgttgatccccacctggcgcagctgctcctgaatgaccacggcggagtcccgcatcacctgggtatcggagcaccagagagtggtggagaagccgtcaggatagccggcctcggccagcagctccttggccttctccacgttgcaggagtagtcggagcagtcggagacgtagccgtccacactggggggcagcatggtgtagttggcgggtgtggcctcgccgctgaacaccaggtcgatgtagccctgggggtccagcgcgtaggcgacggcctgccggaccttctcgttgtcaaagggcgccttctgcacgttcatgcccacataccacacggtggtgctggggaggtgagggtggtgacggacgcgttgtccgccaggctctccaggtcggtgatgcccaggtcataggccaggtccacctcgccggtctccaggccaatggtgcggttcagcgcctcgggaatcgtgcggaagatgacgcgcttgacggccggagcgccgccccagtagtcctcaaaggcctccaggaccacgtcgccgcccagctcccaggagacgaacttgaaggggccggtgcccacggggttcttgttgaactcctccgcgctggtgtccgcgctcttgcagatgatggaggccgcgtccaggctcaggcggtacagcagcgcgttgaagggcgcggaggtcttgatggtgacggtgtagtcgtcatcacaggtgatgctctcgatgatgaggtagttgtaattcacgccggggtttgcgatgcagcgctccaggctgtacttgacatcctcggaggtcatctcctccccgttgtggaacttgacgccctggcgcagatggaacacggtggtggtatcgtcgataacctcccagctctccgccaggcccggcactaggttcatgtcgttgtccatcatcaccagacggtcaaacatctgggtggtgacacgataggtcccgatggaggcctgcaccatgggatccatgtaggtgggggactctgggatagcaacgatcagggtatccttggcgccatcgtcggaaccgtccgtggtcgtcgagctggaaccggtggggccacagccggccagcatcccgcagagcaggaacattgcggtgaacagtgcgaaaactctcttcttcatcgtactcctcctgacgtggtggtgatatatttctgaaaccgcccccggcggtcacattcctgattgtgtgctcagcgcaggccgtcggccgccagagcatcctccatccgcctcgccagctccagatagttgtcccattccttcgctcgcttgggctcctccgtgaaggggagcccggtcaggtcggtgaggctctgggtctccagcacccgggcgctgagcaggtcgaagatgctgttgaacccggccccgatggtggagatgtagtccgggcagtgatatttggactgccggtaatagggcttgagctccgggtcctcaatctcctcctgccggtcggcaaagatctcgtcgtaggcgcaggagatgatctttcccgcctccagcacgatctgcaagcgcccggtgacgccgggctccaccgcctgggacaggccgtaatacacctggccggagggcttgtccagccgccccgcgatctcctctgccagtgggagcatagaccgcttgatgctgttggaggcgccggtgagcaggtcaaactcgcctgtgaggcggttctccgccaccatctgctcttccagatgggtcaggccgtttaccagcaccacgccggacttggcggtccgctccttggtggcctgcagaaagccgtagtcggacagccgcttggaaacgccctggtaccgtctgatgtaataggtggggttgttaatctcgttaaactccaccatctgcagggttccgtcccgccggaccacttccagaatgccgtgataccccttgtcccccgggaaatgcggggcaaaccaattctcagcccggtaatagtctccctttaccagccccataggtggctgcaccgtccagaacagccggtccagcacgtcaacggacttttcgcgcttcttctcttccatgcctctcttcctttccctcattttgatccgcattccaccgccgggtgcggatcttgtattctttgaaaattggcgctataatgattgataaaatctgaacgcccctctgaccgggcgcctttgttttgcctgttacgattataacatgctcccctggctgtcggattataggggattttgttaagccttcgctatttgggattaggtccctccgccgttttgagaaagagagcgcgacatgaacacagaacacctcgtctatatcctggaggcgtacaagtgcggctccgtcaacaaagccgcccgaaactgctatatctcccagtcccatctcagcaccatcatcaagaacgtggaacaggagatcggctatcccctgtttcacaggacggccaacggcatcaccgctacgccggagggactgattttcatgagccacgctgagaagatcgtcaccgagcgcaataatatccagaagatcccgcaatccatgtccgagagcgacagcctctccatcatttgcgcccgctccgcctttgtgctccagtgtttctttgattacaaaaactgcttccccaacctgaacaggacccacgacaaatttctggaggccggcctccgggaaaatctgaaaaacgtcgtggcccagaactgcaggctgggcatcctggtgctgttcgagcaggtcatccccaagtacatggatctggcggaccagtacaatctggagatgacggtcctccagcgctccattcccgtcaccgcgctgatgtccaagtcccatccactggccaactcttcccgtgtctcgctcaaggatctcacagggtatccgttcatcgccgacgcgcacatcgatccggacgatacgctggacgtgctgggactccagagccacacagacctgctgtacatctgcgaccgcggcacgatcttcgacgcggtccgcaaaggcaattacatcgccatcggcatcagcattccggaggaggatgcccggcggatgaactgcgtctgctgtcccatcgcggacggcgctcccatggccgtggccctgctgcattcccggacatttacgctccgccccagagagaagcacttcattcgctatctgactgaccgcctgcacaagcgctattccggataaacggcgtgccgcctcccacagggcagtttgtccgcatcggcgtgtgtccctgttggtgcgatggctccaaacattgccgacagcgtgtgcaggaacgccttttgcacgcatcttgccgcaaagatttaaaaccccaggaactgctgcgcagcggtccctgggggttttaaatagcggctgacttcattctcgttatatccaatgccgtgggctcaattgggtaatttcccgtatgttttttcaatcagagtcctgcaaggggaataaaaggcgtctgccaggagacagccgccgcaatctgccgtcgctgaccgctgttccgcctgtttcaagggcttctgcggctgctggcaccgctgctgtgagcggttctccgcagactcacggcttctttgtgcgcgggagcagagcgcctccctgccggtcaagggcccgggagccgtgcccgcgacagacagctgctcccggcctcagcctctccggctcgttttcaaaaaattcatgaaccgttcacgaggcaaacatagatgaggccatccgggagtagtatacttccaaaagtatagacgagatcgtctgtaaaatcctcaggcagtagccgccgcgggttgcaaacctgacggcgtgtgtccggtcccataccggcgcggaattggtcggacgtcaaaatggcctgtccgtccggacgtttttccgctgcccgcccgggtgtctccctggttccgggttttggcagggccgggggttttggatcaggcagaaggaggatatgcagcatgacgcagaaagagcgccaggaacgcagcagaaaagagatttatcaggccgccctagaggagttcgggacctacggctacgacaaggtcaacatggagcggatctgtgggaaccacgggatctccaagggcatgatgtaccactactactccaataaggacgagttgtttttactgtgcgtcgaacgcactttccaggagctcagggcccatgtggaacgggatatggcccatctgtcaggggaggatacggcagccgcagtcaaagatttcttcatgatccgggagcgctttttccagcttcatccccagcaaaagctcgtttttgaaagcgccatgctccgtccgcccaaacatctggccgcgcaaattcaggccctgcgcgcaccgatgcggcgcttgaatcaggaatttatcgaggggctcatagacaaaatgccgctgcggccggatttgaagcctgaaatggtgacccgctatttggaaaccatcgagtctcttttccagaatatgattgtgagttatcagggcggacatcccgcgcaggatttccatgccatgctggaaaccgcaggcgaactgctgaatatggtcctatttgggattcttcgccacgcagatccggcatgatctccggttcggtggataacgtgatctttgccgcggcactcccctatctctttggaatgcggctgctgtacccgggcttcagcaaacttgtcagctcctttaatctgaagcggccggagggactaggccggggccggtgcaccgccttggttcttctattggcagcgggcggatttttcccggtctgcgcccctctccgggctgtccgcacctcagcatcctcagcgggagcctgctgatctttcaggatgcggcctcgatcctgtgcgcctgcttctccggccggttctggcggcaaaacagcaattgatgataccacaaggaggatttatatgctgaaattacttcgtaacctacggcggcaggagtgggccatggccgccgtgtgcgcagtgctcatcctggggcagattaatttcgatctggcgctgcccgactacatgagcagcctgaccgttctgattaaaacgccggggagcaccctgtcggacatcctgcataccggcctggaaatgctgggctgcaccctggccagcgcggtgctgtgcgtcatctgcggctatctgaccgccaaggtggctgccgggttcagcttttccatccgggaggcggtgtttcataagatcgcagacttcggccaacaggagatgatgaccttctccgtccccagcctcatcaaccgcaccaccaacgacatcacccaggtgcagatgctgacggccatgggcctgcagatcctaatcaagtcccccgtcatggcagtgtgggccatcatcaaaatcgtgggcaagagttggaccctctccgctatcaccgccggatttgtggccgccctgctggtgatgatggcggtcatcatcggcgtggtggtgccccggttccgccgggtgcaaaagctcaccgaccatatcaacctggtggcccgggagaacttgaacggtatcaatgttgtccacgcctacaacgctgaggactaccagaacgccaagttctggaagggcaacgaggaactgatgcgcacgcagttgttcaaccagcgggcctttgccttcctgatgcccggcgtcaccctggccatgaacgcattgtctctggtgatctactgggtgggtgcctccatcgtgaacgccgtccctgccgcggacaccgccgcacggctggccgccttcagcgacatcgtggtgttcggcacctacgccacctacgtcatcatgtccattatgatgatggtcatgattatcatgatgctcccggcggcccaggtgtccgcccagcggatcaatgaggtgttggagacccggaatagcctgactcagggcgcccgcatcgatgccctggaaaccggtactgtggagttccgggacgtctccttccactatccctcctcggacaagaatgtcctggagcacatcaccttccaggccaagcgggggagaccgtggcctttatcggcgccaccggcagcggcaagaccactctggtcagcctggccgcccggttctatgatgccacggagggcactgtgctggtggacggggtggacgttcgggactacaccttcgacgccctgtatgaccgcatcggctatgtaactcagaaggccatcctgttctccggagacgtccgcggcaacgtgctgttcggcgccagccggggcaaggattccgatgcggacgttcaaaaggctctggagctggcccaggccagcgagtttgtggacaggatgcccggaggcatccatgcccccatcgccgagggaggcaccaacgtatccggcggccagaagcagcggctctccatcgcacgggccctggcgaggcgcccggagatcctggtgttcgacgactccttctccgccctggactaccggacggataccaggctccgtgccggcctggaccgggagctgaaggataccactcgactgatcgtggctcaacggatcggcaccatccggaacgcggacaagatcatcgttctggacgaggggaggatggtggggatgggtacccacgaggaactgatgcaaacctgcccgatctaccaggagatcgcccggtcccagctctcccaggaagagctgggggcttaaggaggaaaccaagatgccaaagatgatgcagaacagaatgtgcgcgccgggaaagagcaggcgcggcatcggcggtgtgctcagagaactgttcacctattccaacaaattgaaagcgccctctgttgcggccttttgcttcgccgtggccggcgcagtgctgaccatcatcggccccagcctgctcagtcggatcacggacctcatctccgacgccctggacggggagatcgatctggccgccatcggccgcaccggcgtaatcctgctggtgatctacggcttcagtgccgtctttacctatgtggagcacttcatcatggctacggtcaccctggagctgtcccgggatatgcggcaggacctgtcccgaaaaatcaaccgggtgcccatgagctacttcagcaaggtgtcttatggtgacatcctcagccgcatcaccaacgacgtaagtactctgcagcaggccctggccaacagcctgccctccatgatcagcgcagtggcccaattcctcggctgtctggtgatgatgtttggcactgagtggcgtatggcgctggcagccattgccgtcacggcactgggcttcctcatcatggctgcggtgatgctccggtcccagaagtacttcaccgcccggcaggagaacctgagcaccctgaacggctatattgaggagatgtactccggccacgacgtggtgcgcctctcccgggccaacgagcaggtaaaagagaccttcggcgggatgaatgccgttctgtacgacgcagagtggcgcagccagttcctctccggcatcatgcagcccctgatgactatcatcggcaacctgggctatgtggcggtctgcgtcctgggttccgccctggccatgagcggagagatctccttcggcgtcattgttgcgttcatcctctatgtgcggctgttcacctctcccctgagcaccctggcccagggcatgacccagatgcagacggcggcagccgccggcgaccacgtcttcgactttctccacgagaaagagctgcccgatgagaccggcaagcgccgcgaactctctcctgtgcagggcgaagtcgaatttgaacacgtccgattcagctatccgaatcatccggataagatcatcatcaaggacttctctgcccatattcagccggggcagaaggtggctattgtgggtcccaccggagcgggcaagaccacgatggtcaatctgctgatgcgcttctttgagatcaacagcggaaacatcaaaatcgacggcgtgcccacctctgaaatgacccgggagggcgtccacgacctgttcagcatggtactccaggacacctggctgtttgaggggactgtccgggaaaatctggtctacaacaagaccggggtcacggaccagcagctggaggaggcctgccgggcctgcggcatctatcacttcatcgaaaccctgccccacggctttgataccgtgctggatgacagcattgccatttcctccgggcagaagcagctgctcaccatcgcccgggccatgattcagggcaatcccatgctgattctggacgaggccacctcctcggtggatacccgcacagagctcatcacccagcaggccatggaccggctgacggagcaccgcaccagctttgtcatcgcccaccggctgtccaccatcaaaaacgccgacctgattctggtgctgaaggacggcgatatcatcgagcaaggcacgcacaaggaactcctggccaaaggcggcttctacgctgacctgtacaacagccagtttgaaaaggcctcgtgatcccaggaagaggggggcggctgcgatttggacagtatggaaaatcagactccgccgtgctgaagcgaaaagaacagctcccgcttttcaagccattcctttgaaaagcgggagctgtttccctttccggagagcctggtttgctttggaggcagggctccttccacccgggcccccaatgatcggcattgcagcaggagcccccgtccatccctcccaggatttgtcaaatccgttccagcttcgcccggaaggatatctttcggggcgtctccatctcatcgaactgtaccacatgagcacccttgtccatgtccacatccagcaccgtaccggagccgaacagaatatgcttcacccgctgccccacggagaatgccatgttcccgtcggtctccggcagataggtctggctgtggccgatatagtcccgggccgcccggatcaagccctcctccggcggccgggtgaaggccaggagattgcggtcgatgtccagaagaaagcgggagggataccggggggtgccgtcgaagttccgtccgtctgcctcggagatgtacagtcccttctccgcccgtgtcagcgccacaaacgccagccgccgctcctcctccatggcctgctgcgtccgcaccttccgggaggggaagatcccctcattcatgccgcagaggaacacatagggaaattccaggcccttggcggcgtgaacggtcatcagcctcaccttgtctccctgctccgccgtgtcggcattggtgaacagagccacatgggccagatagtgctccagggtgacctcctccccgcaggtggtctcgtactcatataccgactgcttcagctccgccagattgtccagccgttcctggctgccctcggtgcggagcatcttctcgtagccgctctcattgaggagggccgaaagcacctcggacaccggtctcccccatatccggcggcaaaggactctatcaggccgacaaaccttccggcgcctgttcctttgaaaagtgggtcctccagattgtcctgcagcgcctgatacagggagcggccctgcctctctgcgtactcctgcaaaaatgccatccgccgcttcccaagattccgcttggggacgttgacgatccgccggaaggaaaggtcgtccttgtaggcaatcatccgcaagtacgagagggcgtccttgatttccatacggtcaaagaactggacgccgctgtaaatcgtataggggatcttctctcccagcaggacttcctccaccgcccgggtcacatagtgggcccggtagagcaccgtcatgtcccggtatggcgtgcccgcctcgtgaagctccttcatctcccccgctatccattcggcctccgcctcctgggtctgcgcgaagtggcagatgaccggactgccggagggcagcgtgggctgcaattcctttttgatacgagtccggttcttgtcgatcagggaattcgcggcagagagaatctccggcgcagagcggtagttctccatcattagaatcgtttttgtccccggaaacttcttgtcaaagtccagcaggtacttcacgtcggcgccccgccaggtgtagatggtctggtccgggtctcccacgatgaagaggttcttgtggtaaccacacagaacctccatcagctcgtactgaagctggtcgatatcctggaactcgtcgatcatgatgtactccagccgctgctgccacttgagccgaatgtcaggatgctgctggaaaatatacagggagaacttgatcaggtcgttataatccagtccgaaacacttcttctcctgatacagatagccgtagaaaatgatgtctgccggggtgtccgcctggtcatacttctccttcagcgtgtccagaggcatggcgatcatatccagatagtagtccggacgcttgaacagcttctgcatctcgaccatgtcccgggctgcggagaaggtcatatcccgcagcgtcaatccccgctcctcgtagatgatttggagcatagcgtcgatgtccgcgttgtccagcaccagaaagcttttgggatactggacggcgtagctgtcctcctggagcacggagacgcagaaaccgtggaaggtgttgatatagcccgtgtcattgtcgccggtgaggatgtggatgcgctggcgcatctcatttgcggatttgttggtgaaggtgacgcagaggatatttcccggcaggatgcccagctcgttcaccagaaaggcaaaacgatgggagagcgcccttgtcttgccggagccggctccggcaatgacacggacaaatccttcggtttcggtcacagcctggcgctgggcagcgttgaggccggagagcaaatcggtcatcgtggcgtcctccctgtcgaacatctgtttcttccattatatcagaacccgcagatgttctcaacctcttctgaaaaatccatcagatctcctatggctgaggattggcatacgaagaacagggaagaaggatgcagacattcaaattaaccgcaggtatagggaatccttgtgccgcaaatcacacttatttcaggccaagttcacaaatcatatcttctgccttagaaaattcttttttggaccatatttcagtggcataacaggaatttgacctctatcatttcaatgttttgtactttgccggtagcataggtgcttaatacaagaaagtatgaaccccttgcaatgcaaggggttcatacttaaaataaccctgcctgacccaaaataacgccaagcattcgcccaaatcaggcagggtcattcattttggcgcagcgggagggattcgaaccctcgtgcgattgctcgcaaactgatttcgaaggataaacagaatcccataccgccacatcgagccgttctaggtcaattaaaatgtgttgttttgctcaaaagtcgcacctttttctctgatgcagaggaatattcatgtagcatcaaaacgagtgagggcaccatttgggcaccataagcatcaaccaaaaatcagccgttctagttgttgatatacttgggtatccggtgttattaatggtgtaattgtgtcacgaataattgcttcaccattatttccacacgctgtaagtccaagcaactttttgatgttggttactatatcgttgctagcagatttaatatcatccgtggcatttcctcgactaatgctagcatttatcgcctgttgctttattgtaagggcactattttccaactctgctttcccaactgtagcgcaccattttttgattatttcatcgtccagtaaataggattcaaggtgacgcctatccagcaccttaattcccttttcagaaagttcttctacttcattttcacttcgatcatctcgatcaataattcgaatgacattggtgttcgggacaatagcttgtgttagcccaattacctttagtttgtcttcctcgatgtcgttgcagcctcctaatgagtagaacacagtgctcgggtgagttgtgctgaaaatatttgcatagcactttgcatcaaagtctttccgtttcctgcccctagtagtcccttcgcagaacactactgtttccggggcaagtaaggtagagtaattttctaaagtcaaagatagaattctattccacaaattatgtgaaacgggagaaggcataatctgaactacatcatcaaaatcaaatccatcaaaatttaagaatgcaacacttcccggacattcggcttcaagttctttggctttatttagcataccaagtgaatgcgtagcaatccataactgaccatttgctccgatcagagtgtaaagttcacctaagagtttttcctgtaatgctgtatgcatatgggcctctggctcgtcgatacagaaaatggtgtctggatagtatttttgcttaatgaccaagtctaatatcaaatcaaacgccgctttttctcctccagagagatttttataggagtaatttttggaaacccctttgtcaaaaaggaagtcgccattttctgtgggatttcccacaccagaaagagttaagtcaccaaaaaggcgagttagagattctcgaatttttccgattaattcatcacgtagtgtggctaccgatttctcgttgtatgatgtatcatatacacattcaagcgtcttagaaatcaaacgatggtagtttttcgcaacctcctgatcgttctctatcatcatgtttttatttgcaattgctgtaggcgcttccaccgccgatatacctttgatagctagagaagggtcattccgatacgcggttcgaaaatagaaaatcgaatggtttttattggtatcctcaccatcataatcataaaatgataaatcaactaatttgtttgaattttcataaccatcttgccctactggagttttattgcagtagctttggtctgtggggaggccggtatatcctttccacaattgccaaaccttaaatgcatcaaaaacggaactcttaccacatccattcggtccaacaagtacaaccaatcgagcacttgagggaatagctgttatagtcaaatctgtgaaacgtttaaactttttcagatgaatttctttgagtttcatataaggatgccaacctttctacaggttttttcaaattatagcatattcttaaagaaacagcaaggaacgtgtcaccggacacgttcctcttttactttgattctggcgctttccaatatgtattccttgatagccagctttggaatacgccatacacggccattccgaaaccccttgagcttaccgctgtttaggagatcgtacatagcattgtagcccattctcagggcttcacaggcttcttctactgtcagaatatcaggatattcctctaacattcattccacctcctgcaccgaaagatgggcttcacagcggggacaagcgctcaaatcaagcgagcaggagtcacataaacaagtaggagccttgggcggcgacttgtggcgcttggggttcagcgtcctttggtagagatccattttctcaatttgctgcatgactgccggctctgatctgccaacagcaaaggcgatttcagaaatgccgtagccttcttcaaacatcatttttacagttcgcttttcatcgtcccgccaaaactcaccttcgtgatcgaagcgaatcgtgccgttacggtggcggcgaatcatttcacgttcaatttcaggactcatcatggtttttctctcctttttcagattgatttaccatgatgttcctttattacgcacaaaaatctcaaaaaatctgtggagcgaaagataaggacatttattgtccatgccgtgtgctattctctaatcagtctgatccgttgcgcaaccatcggcttattctcctgcctatgttgtcaacaggtccggttaggcggcggatgttcgtgattgtggcacgactccgccgctgtttttccttaatacactgaaaggaacagcctatgaatatattattatccctcaagaaattctcccacattggctattacatacatgaagcccgaacaaaagccaaagaaaggaaaaagcaccatcgagatcgcctgaacctgtcgaatgaccaaatcaagtatttggataaggtcgttattccggaagggtgctcctaccaagttaatgaccacactttttccagcatagacaaggctttagcttattgcaagcggctgtccattgaacgatgcaaaaagatatggggagccggaattcccatcagtattaccaacccgaatgcacccaagatatttgattgcgcctgtttgcctgctggactgcttgtaaaggactccaaggactttctatgtcggtatgctcctgtccgtatcatcataattgctgtagatctgagcgaggtttacacggaatattttgatttgtatgaaagcgatattttctccaatgaacacctctatgactacggacttctttacggcaattatcctgtctatcaggaaaccgagctttgcctaagcaaatttagcgagcagtacaccaagcagatcaacacgccttttgtcccagaacccgcctttggtgatccgtccaaagaatataccgggctgatggatgttcatatggcctacgattgctattccgtggaagtgctctctgacggcactgtctatgacgatgggaactacgcatttcctttggggccattccagtatctacatttgtgaatatcggcagcgctggcgtgtattgcaagtgctggaatcttttttgggggtgctcccgctcctttgaggtcaatggcaaggaacattctcttttccgctctgcgctgttggcctgtaagcagtccgaattacctgttggaaaagagttctataccatcatcatgcaccagaaagaagcagacggcatcataccagcagattcactcccggtttccctgcgggacagctattcagttatgactccccacgcaaaaaagagggtgtttcatatttcgccccaatttgacgagatatattgggaaacatttgaactggcagattcgagcggaaatatccgcaacttttgctatgaccactggcttttagatcataactgtgaatggaacgtcggagatatctgtaagactacctattggggaaaatcccggtggggcaatccttgtatggatagaggtatcaaaattacatatctcccagatgctaaaaccccatactatggtagaggtgatttggaactttattgcaagatttctgtagggagcaacagtctaaacatccctctttccacactcattaagccatcttccacagaatgaaatagcaagtgagagtgacgagactttttgtgttctcgtcactctcacttgtttgattattctttgctcacttgttttttgtgtttaatggcacgtttagaatatttttcgactttggctgcttttgcgacaaagaagaatatagactcgccgaacaaaaataactgccaaaaagatactgcacctggaacgacgaatatacccaaaagtgtaatagccaaataaactattgctcttacaggtttattgagataaaaccattgtgcgcctacaagtcccagaaaaagggttagcagtccggccaccgccttgctctttggagccattgttttactctgagtttttttgatagcggaatttgacggagtttttttgtttgcagtattaccaacaaaagaggcgtttgttttagattgttgttcagcttccttggactgaactggttccgccttggcttcttccgctacattagtggtttgcgttttttcgcctgctttgggacatggggaaacatctgaaatttctaatggctttttatccattccaacagcagactgggcctcaattgaggctgggcctactgttcctatagacgtcgaagactttttttcatcagatgtttcttcagcctcggattgaaccttcatttgaatattttccgcagtagccttttcggcagccgttgccaatggaccagctacagtttttgcgttctcagataatccgtatgcaaaagcaatggttgaaaagtaatgtgacatactggggttctgtggaatatttagtgctttgctcccttctctatagtaattacctaatttgagcgccgcaaagggctccaatttttcggcggccatctttatcatttcgataccctgttcggagtcgttaattgcacacatccatctaccaatatctccaatcgctaaaatattaccggcatcggcaaatattttggcttcacggaagtatttactcttatcttctttgtgtcctacggattgccatctccaaggggtataatctaaaactgtgtgcataagaaaggcaactaagtattccgcaaatttattgccactgtttgcacgctgtatcaatgaagtcatcttttcacgaacggcatactgttctccacaagctggattagatagcttatagtagtagagttttaaggtaatcatggcctccaaatcatcacattcagccatatcccacagcagattttcctttcctgcgattatcatctcggcaagttctttctgctttcccttgatctgcttttccagtgcttgtgccttgctcgttctttcagcttctttttctatctctattgctttcttttccaaagctttgacataggtggctacattcaagtacggattatcccttgcgagcgtttcataactttctatctttttccggatttcctcaactgttttctctggttcggtctttattgagtcaacaatctttttgtctgcgctcagaagggataatttataatttctctcgttaccaaagaacttggccgcagaatgaatatccgatttcctcccggtaaaaagattatagaggtgaacgtaaagaatggtggaatatggcgcctgttgtatgcaatcgcataagatatctatagctttttcaacattttcagcggatgcctgtgatgcaattcttgcaatatagtttttagcccttgcatttgcggcagcttcatcgaaatcatattcatcaatgagatcattttcaatcagcagtttttctacacaataaaacacttttgtgctgaaatcgtaaacggtatcaaagaggcacgttgccactcttggatcaatagcaagctcctgtttcataccacttatctttgctttgtcgcttgctttcgtaagggtatccccgataccatgaaatgcccctgcaccaatgttgaatgctcctgcaacaattgcacctttgaccgctccggtgacaccaaacccgccaccttcccaatgacctctgcttgctttttttatatctctatagtctcccaaattttctgcatagcgctgaatttccccagcttttgcatatatgtatcccagagactctttgatgttgccactctggaccaccatgtttgccaacatggtgtcatcaatgtcatcaatgccgtattccataagaacgtcaacaccgaaacgaacggcagaggtgaccttttgaacaacctcggggatttcttcatcgaaaaggcccacaaatgtgtgctttcggctcttgtaaaacttgatatattcctcttcaagactttcggccttttcaaaaaaacgctttctcagtgtattgtactccaaaaaacgaggagaaaagaaaagttctcgaccaagtaattcaaactttacatctggttctactatatattctttggctttatcggcagtttcgtcagaatatcgtgttatatctgcgccacaataagggcaaagattgaagtcatcgtttaactcttttccgcaattatagcaaaacataatgcgatcccctttgcaagtttcttgtcagataagtatagcgtaatatcgtcataaattcaatgatttatgacgatatttgtaatctaacgattttgcgatgtgcagggtacaataataaaaacccctcgtgagggaggatgtgcctcgtgcttaaatttgatgtaacaaagcgaataaaggatctgtgcaatgcgtattcttggacgtattatcgattggccaaagaaagcgatattacctactccaccttgagcgctatgttgaacaaagggactattccgtctattcctactctcgaaaagatatgtaaaggctttaatatttctctatcgcaattttttgccgaggacgaatcagtagccctaatgacttttccgcaaaaagagtatttggcccggtgggagactttaacacaggaaaaccgaatgtgcgtagacaaatttattgattttttaaaagcaaagcagagcgaaacggatagatgaataattgaatgatatattatctccatgtataaagcccgaggcgaaacagcctcgggcaaattttgtttatggaggtaattgactatgaaaaccaaggaagtatgttcccattgtgggcatgaatttccccgaacagagctgacggagttcgatggcgagttcctttgtcccgcctgtctcgaaacggagacttcggtgtgcgaagactgcggaaggcgcatttggaacgacaacaatgagggcagcggcgatttgatcctctgcggcagctgttatgaaagaaactatgttcactgctcccgctgcggccgtctgcttcacgaaaacaacgctttctatttcggggacgatgatgagccgtactgtgagtcctgccatgatatgctggacagtcggatcatccacgagtacagctaccgccctgcacccaacttctacggcaatggcccccgctttttcggcgtggagcttgagatcgacgagggcggcgagtatgagtccaaagctaagaaactgttgaacgtagccaaccgggatactgagaatatctatatcaagcatgatggcagtctggatgaagggcttgaactcgtgacccatcctatgtcgcttgaatatcagctgacaaagatgccctgggtagaggtcatggcggaggccgtgcgacagggctaccgctcccatcaggccaacacctgtggtctgcatgtccatgtgagccgggaggccttcggtgcatttgcggtggagcaggacagcgccattgcacgtgtgttgttctttgtggagcgtcactggaatgagcttctgaaattcagccgccgtactcagcgccagttggagcgctgggccgcccggtacggctacaaggatcatcccaccgaaatgatggagcatgtcaagaaaggccggtgtaaccgctatacctgcgtcaatctgaccaatgaggataccattgagttccggatcttccggggcactctgaaatacaatacgctgatcgccacgctgcagatggtcaaccgaatctgcgacgtggcgatttgtatgtccgatgatgaactcagagccatgtcgtggagtgagtttgtgtccggtgttactgagccggagctgatccagtatctcaaggaacgccgcctgtacctcaatgaacctgttgctgtgtctgaggaggtctgatatgtgctgcttattcggacttttagattacggccactctctgactgctgctcagaaaaaccacattctggcggtgctttctaccgtctgtgaggcccgtggcaccgatgccaccggaatcgcctataacaccgataacggattgcagatctataagcgtccacttcctgctcaccaccttcgattgcgtattccaaaggacaccaattatgtcatgggccacacaagaatgaccacgcaaggctgtgagaaacacaaccacaataatcatccgttcagtggccgtgcaggtggggttcctttcgctctggcccacaacggcattctccacaatgaccatgaacttcggaggcagaggaaacttccttccacaaaaatcgaaaccgacagctatgtagctgtccagctgatcgagcgatccggagaactgtcctttgcaagcctgaaacagatggccgaagccgtggaaggaacctttacattcacggtaacggacaatacggacaacctgtatatcgtgaagggaaacaatcccctctgcctgtaccactggcccaagttagggctgtacctctacgcatccaccgaggacatcctgaaacgggccttacagggcatccggctcaagctgggtaaaccgcaggaggtcaatatcgactccggggagatcgtccgtattgaccgctttggccgtattacccggagcattttcgatacctcccatcttttccgcagccgcagttactttggctggccctaccgcttttccctctgggacaacgataccgcttatgacagctatgtgtccgaactgaaatcggtagccagagccttcggatatgctcccgacgatattgatgatctgctgaacgatgggtttaccccggaagaaatcgaagaatgcttttacacgatggaggtatgacatgaaaattctcatggtcgaacccggcaaggcaccgaaggaaaagaacatctccggcactctggattccatgcaggaagctgttggtgggacgattcaggccatctatccctttgacgaacctgtggctctgatttgcaacgatgatggcaaactgatgaatctgcccatgtgccgctctattcacgaaataggggatatcatcttcggcagcttctttgtctgcgccgccccacccgggcatcggaatttcacatctctatccaaggagcagatcgagcgatacaaggagcggttccgcttcccggaaacttttctgcgtatcggcggcgatgccatctttgtgctgagaaatttgtgattgttcgttaaattgtagaaatacgactaccaaaatccagtgttttcaaggctttcagcggattggccttaaaagttcgtatttcccaggacgataattcgtatttcagactggattggaggtgcaaaatgaacaagcgaaccgtggctctgaccacggagcaatacaaggaaatcatctcaaccatgaagcagggcttcaccggatgccgtccgaacccacgggcggcaacggcactcatgctggaagcaaacttgggtttgcgcatctcggacattgttcagcttcgcctgtgcgatattgtcaaggacggcaaccgctatcgtcttgccatcatagagcagaaaaccggaaaggcccgtgtgtttaccgttcctctggcgctgtatcagtttatccgatgctactgtctggataatggcattgggagcaatgatctcatattcccggtcacggaacggtcggtacagaagcatctgaaaaccgtctgcgactatttgggtttctccggtatcagcacacatagcttccgaaagtattacgcaacggagatttacaaaaacagcaactacaatattgcgttggtccagcagctcctgcagcacagcagcgctgccgtgacacagcgctacatcggcatccagcagaaggagttggaggatgccattgaaagccatttgaaattagacgtttgaaaggaggaacccgcagtgatttggttcttggttggatttgttatcaccatgatcgctttctgcttcaccgaagtctgcaccgcaaaatgattcccgctatcatcatggatgccataactctgttcctgaaaggtgccagtgccgctattgcagtgtatgtgtccatgctcaagaaacgggacaaatgatttgaggggttagggcgctggccctaaccccttttctatatgtcaacttttggtttgggggaggggaatggggcctcaacgccctgcgggcggctcggccttcccctcccccaagcctctttcccttctggcccaaacaatacctgctcaccaaactttactgtgtcaatgtgcttgtgtcagaactactctaaattttacgggtcaaaaagcataattacggcggattcacagtcgatgattcaagctgcttttgacactgacacatcggcacaataatttatcaatcctgttccgtatgcgtgaaagcaaggtctgacaacgattgtaactttgtagccctgttattttgtacaaacgaactgctttcgtcaataaacccaccatctcttaaaaatcgcaacacaaaaagcttttcctctggtgtacctcttgtaatcgcaaggaaacatttcaacaaatcaaggtctttgtacccaagtttctcgagcgtaaagattgtttcaagtatatgatatggatccttttctgttattctttcgcatctgttgctcttgatatcggtacggcgctcctttgcgaaggcttcatccccaatcttttgaaaaagtctttgtatcaaaggaatgccaaataatgcatttttaatcacttcatgccgcttgtctttggcatcacagattcgtaagaaaacctgcatcaactcacgatcctctttggaagccaatacaccatctttataaagggccattaccgcttcatccgcataaatcagcgctggcggtcttggtgtgctattagcgcaactgagtgcaaacattataggctctgtaattgtcggcaaaaacttttctactggaaactcccccgtatagtccaatgggttatctgttttcccaacaaggtacagcggagatacatcatagattaaagcaaacagcttaagatatgttctgtcaatagatgcccttggcctgagggcattctcataaccaacaattgaaacatgggacaagttaagtagatttcctacagatgtttcagtcaatccaattctttcccgacattcacgcaattttgttgcataatacgagactgttttggggtcaatcagctccgcgtccttgagtttgctgatagctatctcggtttgcgttacatgagcaggaaattgggtctcaatttttccacaggtcttgagtacttcttttttcttgcgaggcatggtttctctcctttgtaactttctcttgttgaaaaaaggttgtttatgttgcgaattctcgactttcagttttcgtggcaggatgaaatagtcaaatgacaccaaaatcagcaaaggagagtttgccatggaaaagaaacattccaacccgtaccttgagcacattggttcacagcaaaaactattcgaacccatgatacctacacgaccaattagggacgtaaataaccactcaaaagttatttacatagacgaaaccagagaacgcatccccgatccgccgaatccgagaaatctgttaatccctatggactttcatgaaccggatgcaatcgatatgagcaacaaagagatcctcaagatgaagggccttgtttcggaaccggcgatgtacagaaatacttccatacccacgtcaacacctgtgtaccgtcagatacaagttccttcaaaggatgagcagcccacagtgcaggaattgcttccgaaagtcaaagtatcaaaagctaccgacgctgagagcgctccctctacctcagaagacaaaatgtcaccgtatgatactgcgcagtatttacttacacgcttccacatgaagtcaataagtaatgtactgcacatatttgatggtcagtgttaccggccatatccaacagatacagcgttacgctttattgttgataagtgtcgctcacaagccaaggccgccggtacccccagttttcctaaatcggtatatgattgtcttcgcaacgaacctcgcattgaatgcaaagtgggagaaaacagtactgaacgctatcgctttgtaacttttgagaatggaaccctcgaccttaaaacaggccagctacatccccattcaccccaatattttacaacatactgccttaaatgtcagtataacccgagcttcgctaatctgtctacgccctattttgataccttcctccatcagatgagtggtggtgataggttgttagaggccagggtgttggaattcattggctactgtcttgttccggatcttgatgggcgagtaattttcttgcttcaaggttactctggcgcaggcaaatctttaatttcgaattttctccgcagtctttatcccgacgaagtcgtttcatcgttgaatgtccatgaacttggtgacaagttcgctgtgtccgagttgagtcgcaaggtcatatgtttgtcgcctgaccttcccgccggagtgctcgatgataagtcagtcagtgctctgaaaaaactcagtggccacgacaaagtatcctccgatgtaaaattccaatctcgggtggaatttgagtgcgaggcaacatttgttttagcaacaaatcacatgttatgcaccaaaaggagagatgaggcattgattgaccgtatcgttgtaattccctttgccttccccgtggcaaaggaggcccgcatgccgtcgttaatcgataacctaaaggaggaaacggatcgtatagctaatcgggcactacaggcatatttttgtctccgcagtaagcattacatcttttctggcaactacgagatcaatgcggttactgaggcaacatcaatcagtagcgacctcgaatcatgtatggcagcatttgtacaagactggattattcccgatcccaatggaggtgtccataattgcgaagcctgcgaacttttttgcagcatttataatcttagtataaacgataacgctttttcccggttatttactcggtttgtttctcaaaaacatcctattgaacatggtcgggtgagattgcccggtggtggaaatcccaaaaattacataaaaggaatacgacttaaggatggagggcaagtgaaatgagaatttatgcggttttcggagataatgctgttatgattgagtattcctatgagcacgcaaggtattgcctgcacaagtacttccgtggtgcacattacaccaaagcattcggcagcattgccgaggcaacagccgaagcaaccgaccatctgtgggaaattgccccgctgaaccgggctataccggagttcctcaaacccgggaagatttactttgccaataagcttcccctgaatacccaaggagaatagccatggccaagaaaatgaaatctgacccgcctgaactgctcccgatgctgatgccggccagtatgatggcaaaggtttccgggatcggcgaggcaactctgcgaaccttgatggcacagggggaaatcgaatacctgcagatcggcaaccaccgcttactcagcgtcaatgccatctgggcctattacgaaacccataagacaccttctaagcctgctattaaggcgaggtttgacgctatccagaaaatgaatgcggagagcgcataatcaaatctgtcccggaaggcacacgccttccgggactctgatccaactataaggaggcaaaaatggctattacagaaagaaccgttcaaaataagcgtaacagtgtcggggaattaaccgggaaacccggtatagtttacgacgtgaacatcaagcacaaagtcaacggacagcagaaaacacattccaagaaaggttttgccacaaaaaaagaggccttgcagtacgaagcagccatgaaaaacaagctttcaaatccgtcctatgttgcacctacagctgcccaacggaaaatgactgtggaggaatatttggaggaatgggtcgagcggcacggaaatgctaatctccgtcccagtacaaaggccagctacaggtctcatatccgtaatcacgtgattccgtatatcggaagcgttccgcttgggcaggtaactcctgccatgctggatgatatgttccggcagttgtacgagaaaggtctctcccatagctcagtgaaatatgcccatcgcgttgtaggggttgctttcgaacacgcacggaagtaccattacatcgaaaacaaccctgcaagggacgttatcactaagttcggcaagcagggcaagactcctgacccttatacgaccgagcaaatgagcacactatttgccaatgtggctggttccaagtgggaactgatcgtggttctcggaggcctttatgggcttcggttgtctgaaattcttggtcttcgatggagaaatattgatcttgaatccaagacgtttgctgtggttgagcagctgccgttcggaataccggcgggaacagtgaccattgatgaaatggctcctgtaaaatccagtgatcgtgtcctgccgatcacagaccttactctgccatactttcagcgccagctggcattacaggccgaacagagaactttgctgaccggagcgggacaagcctgctatgacaatgatttggttatcgccaagcccaacggggcaccggagcgccgggagcgggtatcctcgaattttggtcagcttctgaggcacactgggatgcctcatatgcgttttcatgacttgagacattcggcagcaaccaacatgcatcagcttacaggcgatttttataccgtaggtatgatcctggggcacagcttgaagggcatcggtatccagctcggaatctccaataaccttgagtctgtcaccgctcagtatgtagatgtgcgtctggatcggaaacaggtggtgcttgatacataccatagagctgtgttgagtggcaccaatgtttaaataataaggccagcgttgaatttcagcgctggccttattctcaacgtatatcttttagtaacactcttatctaactatcggaataaacttccctagatattcgcgcaaagcatcatcgcaaacatatacataggttcctaatattccgcgagtcagcagaactgcgtaagtgttgagaatatagttttttaattcatcatctgctacagaccgtttcactttattgtcaaaaaagtgttttcgattaactctaacttctctgctttcagtatcataatacaaatccgggccaataactaccgcagcatagttcagatcaagcccaggcaatgaatatatgctgcccatctcctgctttgcgttcgggtttctaagccatccgccagtctggcgattccaccatacatcaactccatcgatagatatgtccggtctatcaggagagtctttcgcaatccacttccaagcataccctccacacaatctacacaagccaacagacttttctttcatatcaagagtctcaatcatatcgctaaaggagcaaaaaatcttgaattcatagtttttgaaatttaaagcggagagctgtttttgattcaatacggcatgaatatagggaacgtagtcgtttccggcgcgaatacgcatctgatcctgtagttctaccggacggataccacaatgtgaaatatcaaggcgttgatgaaaaacatcgtaaggaatatcagaaggacacgcaatttgctttctatcgtagagcaacacaagacaatcggagtttttcacaagccagtctaattcgtcatgcgtatcatccaaccccagcctagtgttgccgcttcggaaattagtaatatacatacccagatttttgtttcttcgtaatctgtgcgcctcgtcacaaatgataatgtcataatgcttttttgtaacatcaattgggctaataatctctttatcatagcccccaggcagacgcttaaatgcagatcttagttcacttcgtgtggcagaattggaaaataccaaaccgacttgctttccgttgaaatcagggttcgtcttaaggtgatagaacaaagaggatgcaatgaccgtctttccggttcctgcatcaccttccagaagtatgggcctagccttttttgcctttcgttgttttgtgatgcgctggtatgtatggcatttacaatatttgtcaaggtggcaatctgtttatctgtaaggctcgtttgaggagaatacttaaactccgttttattcaggatggcttgaaactctttgtgctttaccaatccacgctctaccagctgtggccatagcctgtcaaagcccagttcaaactcgttttttcgccgataaaatgtgcgttcaccctcactgcgattgatgacatgaaatctgcgatcaatacgcattaatttaatcaaaagtttttcaaaatgctttgccggagtttcttcaatgtcctcgcctgttattacgtggattctcttaaaatgaaaacggtaacaccaatcatccttacgatgatgctccttgcttcgttcaataatatcatttgtctcaccgacatacgcatctctgccattctctaagatatacacatagtgaaaatcatgagggaatgtccatttgccgtagtcaggggaggcatagtcatatgtcgtaatttcaaaactaactgttgtaaccatttccatcacctttgcatttaatcaggctacattgattatacaaataaaatcatacaaacacaaccgaaaatccctgttatcatatcgtcttatacgtttccgtatgatgcgtggtaaccctcaaaagctatatgagttctgcatatgatattctgaagttttatacgtttctaccgcccctctgggcaccatttgggctccacagcattcattttcgccgaatggtattcagtgcttgggcaccacaaacagggcaccatgggcaccattttggtttttgccgcaatcgaaacttaatatcaagcaaagagaaaacccttggaaactcagcatttccaagggtttttggcggaggcggtgggattcgaacccacggacgggattaaccgtcaaacgatttcgaggggaataatgcataaaatatttgctcatatttgtgcataacgttttattttgccatggaaagtagctatataaaagaaaaattccatttttcttcacactggtgaatttctgacttcatatcatcacagatcggcaaaagcaccatttcggcaccacgctaagcaatcatcctccctggggtaacgtcagagacatcgcggcttaagccgcgtcaaatgaaggccgtgcaaccccctggccggacgggggttgtaggccttcatttgacgccttcccgacagggcgccgaaggccaaaattttgacgatgtgggagcggaggtcgtagacttgtcttaaacctctatactttctatcaagtcagagctgtaagtcccttttctttcaggaacgcatcggaactattgatagccaaatcaatgtcgacctggttaattcgattgacctcggtagtggagccactggagagaacgagctggactttgcacatctggaagaggagagctaccagttggacagtgttctctgtcataagcttctccgaatcggtaaattcgttccagtcagtttttccggtaagaatcaccaagttgcccagttgggcgagatgtcgcatatacacattgttagtagcagacagagctttttcgaaccgttcttctgtcatgtgcaaagattcaagataggcacagattcggtcaatttctgtcttggcttttttcatctgttccatagcctcgtccgctttggctgagagcttgtttccggtaaagttgaagataatgccgcctaccaggagacccatgcccagagtggtggcaccaagaatggtggttccaagagctataccgccgccaccggcagccagtgcaccaccacccagggcagccagcgtggcgttagtggcagctgcaccactaagcgaggcgatggcagtgcctgtggaggcagtacccaaagccataacggcagcagtagtagcaccagcagcagcaaacccaccggcagttcccaaagctgctccactcagccctcccagtagaacaccagcaccgaccgacacctttttcagatcctctggactgtatgttggaatcgtgacgtcaccgtgcttgaaagcgcggaactccggcttattctggatgcgctcaaaaatgtctgagaacttctgaaaactctgcagaatctccagctccagctttcccagacgatccatggcagcagtgcaacgttcattccttatctcaaaccgcctgacattggctgtatgtgcctcttgagtttgcttcatggtgtcattggcttttttcattttaactccaccatgaattgcactcccaacaccagctgctccggcaactgctgctgcagctcctaaaattaaaggtaatggcatcgtaaattcctcctatttttctaaattctttagtctttggcaggcctcgcggttcaggcgataatatgtatcgataggcatcacttccttgaagaatttctggtagctctcgtctactctgcacagcaatggacgtttctcataaatgctgcacagatttccagacagatatttgcaggtgccatcgccccgatccagctctgcatacagcttagatatatccaggtgccgacagcaggctccacaacgatcacactcaaacatagcgattgctcattcgtaaatcagatgccggctcttatccctcataaaagtgtcaaaatcaccttcccagggaatcgaaatgccaagctccaccatgttctttttcaaaaagaaattgaggctcttttcatcttcgatgcagtcaatataactttcaagcggttggtattgggcggtttctttttggaatgcagccaaatcaattcttttgagttgctccatatatgtttgcagtgatgcggtaattttcttataggcatccaactgcttttgcagaggtgcttgaataccagccctgaggcaaatttcctttagcaccagcaccgtgaaacgtccccatgcgatgatgttcatacgagtaaaaaacattagccaatttccaccagaacggaccaatgcgtctgccccatccatcaaacataatgtaccatgtccgaaaaggagcattatgcgcaagtcggtatgtgactgggtggggatgcactcctttaatggcttcttgaaatagaatcgctgctttatcatccagataaaacggaccaatagctcacaaagtagtacaggaagcgacatggctatgccaaaccgggcgtcgtacccctcttgaaaggctcgaacagccaatgtggccaaatcttgtttatcctgtccaatgttgaactttccgaagttgcaaaattggaagagttcaaaaaatggaatcgccacacctgatcctcttccaatgttaccgcgactaccagaacttcccgcaacatcggacatgatgtgtccaaaccaatttacaatgccgcagaaaactttagagacaaggttattgccttgcaattcaaaggattctgttttgatagtaaccagttttcccccgctcacaaacgaagatgtagatgtaaattgatttaagactgagaaaaacaatccgatgatatcgggcgaatgtgacagagatttgatgtggtggtttttggtactcatattgaatgcaccgcccacatccgctgaatatctctggtcgtagttgactttatattgtctttccagataaccaattgcactagcaacgttgccttcttttccaggtcgtggagaccatccacttttttctgcaaatttttttacagcttcatctacttgcgcatccgtccattttccaatgacgctttggctcggtgcacctactagaaaaatatcaactaaaccagagactgccccacaggccactgcaattaaatagtcggatgaatcgcaggcgtgtttctgtagcagttcaccatcttttttttcaattaaatcctccattattgcatcccctttccttgctcattcgttttttgtgggcagtctttccaaattacacggtccccctggcttcttagccacatttcaatgcccttgccaaagacctccgcgcggatctcataacatccgtcgtgctcactgagtatctccgccgtggagagccggtccagtaccgcctccacggatggccctttatagataaaacgcaccgtttccagtttcccgccgtacatgaactggacccgcttccggaactccccctcagagaaacggcggctgtatggcacctggaagtgctcgtccagcacctggagcttctcgatcctgtccacccggtagatcgtggggaagggatcatcggcattctcaaagtgctctgcccggtcgatgccctcaataaaagcggtcagatagaaatagaactccgaaaacagcaggcccacaggctggagccgtcggctcttccgctctccctgctgggtgcgatagactgcctcgaccacggaatggctccaaatcgcctgtcccagtgtccaaagctggttcgagagccgtttcccatgatatggctccacatagtagaaccgctcgttcgccaggatctggcccaggagcttccggctctgcggggaggcacaccggctcaggagcttatccagaatcggctccatctcatccttcggcatggagcggctgtccagcaggattttgcacaccgccagcagctccccgcaggagagaaagctcccggcggcggaggtcagctcataccgctgctccttcgccttgtataggatctcctgcggcggctcctgactggcaaaaaaattacgcaggcagtcgatgtccctctggatgctgcgctcgttgacaccaaagcgagcagcggcttcttttttctgcaatccctctccgtggaccagcatttcatagagatacagcaggcggctgttcttgtctgtctccacgccaccacctcctgtctctatcatagcagcggacatagacactttttgtccatgtaaaaaattgcgctgaaagttcaacgtcattataccctaaaagttatatccattcaaccccacaagttcatttatagataaaactctccgggttaaactgatgaaaaacggaggggcgctatggactgggtatcaatcggcgggagaattcgcaggcagcgggaatttctgggctacacacgggagcagttcgcggagctgctggacgtgacgccgaaattctgctcggatattgagctgggtgtcaaggggatgtccgtccagaccctgtgccggatctctgaggtcctgcgcctgtccacggatttcatcctttttggcagggagaacaccgagagttccagccccatcacgcagctgctccgtagctgttcctcctctgagcaggcctatgcggaacagcttctgaaaacctttatcatggcaatgaatgcaaaaaaagaatcgctttgacaagcgattctttttttgcgtccactcccgatggggaatggattagatctcaccgctgtaaaacaggtcttccagctcttcagcggtgaagccttgggcggccagcaggtcaatatcctccggagaatacccaaaggccagcgccacggttttcagttcatccaaatgggtcgtgtctttttccgcatgggggaaactgcggcagtatggatcgttcatcaggaaccgggggtatctgaaccggaacagcttgctgtcatcaaaggtctcccggtcgagccgcccagtctggttaatccgcagaatctctccgcactggacaggaaccttccggctctttccaagcggtacttgaagcttccggagcgcctgacgaaggatttcttccgttgaggcatagagatagagaccgcagtccgggaagaaatacaggcagaaggggttgtctcccttgacgatgtagaaacttccgtcatctcccagcaccgtgatcgtgaaggagccttccagcagctccgccatataccggaggctgtcaaagttcagaatgcccttctgcacaatcagctggacggcgatgtagctgtccgtctcaatcctggttctggaaagatgcaggctcttccgcaggctgatgtcattgtctaaaacgccattgtgggccagggcaaaggtcccagtctgcatgatcccccggaacgggtggttgttatagttctttctggcactgccctgggtcatcatgcgggtgtggcccatggcgaagcgggagttgtcgcggacgtagaagttcagcttgtggccgggaatgggcttcttatagatatggagattcctgccggagtcataggccacaccggtggcgtccgttcccctggcctcactggcagatgccagcgcatggagcatcttggatttttccttcccggtaaagcgcagctccgtgtcgatcaatccaaacagacagcacattgtcacacctccacttccgccatgaccggctcgttgacatacagacgccgctctttcagataccgcaccagctccggagcctgacagccggagacaaaggaagtccaggacagggctttcagctcgtcgtcagacagatagatcgccacgtcacagatccggtcaacgagctgcaacgtggcgatcagggtattgtatttgagtgttccccggaacatccggaattcgatggtgtcccggttggtgaggtttacgcaggtatagcgcccgccgtgataccccttcttggcgtgatccaggatctccatgggctgctccttatagccgtaacgggatgcccactgatccagctggtgctgggtgcggcggctgaatttcagcagctcttcccagtgcttctcgaaaaagtagaggacacgggcaatggcggtgtcctgttgttcctcagtctctccaaaagccagacgactcacatggacatggaggccacaggtcccggcctgatggctggtgtagcccagatccacagctcctttgcagatttgctcccagggtatctgctggagctggtagctcagggacatggggtgcgtgacgatctcaaatccctcttccagggagccatcatgcttgcagtagatccgttcctcttcttcgttggcgatccgcaggagttttttggcgttggagccgtactccccggctccatcgatttctagctccacgccaaagaacctggggccgtctccatagaaaatcggctccggtttgtagcagtagtcctgaatggcccggtcgccggcggtccgggtatagcaggcatggcagagcggttcttcctcgtccgggtcatcccggtcatagtaggcttcgtcgttgtgaagcagctccccgcagcggacgcagttggtgtaatagcggtcatagcaacgctcgcagagcggcgtgtcactgttcccggcattatcgtcggtccagatccgttctccacagacatgacaggtcacggtctcctctgcaaaacagcgggggcaaaggaattgcccgtcgaactcttcccgctgggagataaggtattcacgtccgcagatcgcgcagacataggtttcctctttcatcactcattcctccttcatcacttggtcgatgatcgtacataagatagcagcggcggcagccaggatgatccccaggacatttttcctggaatcagttttcaccccagggtgcagaccttgcggagcagctggtctaccagctccaccagaatagcgcggatcacggaaagcagtgtgttcagcatggttttcctcctttttcctttcaaaatgaaaaagcggcggcgattgctgaatgccaaaggcattcagcaatcgccgccgctctataagaatgatatttctttgaaagggacaggaaaagcaaacaaggcgctatctgggaaacagggggataatcaaccggaatggaggaatttgaaatggatcatagcgaatacagagaagctctggacgcctataagcaggaacgtctcccggtggtgctgaccgccgccgaggccatggatcttctcggtgtggggaaaaacaccatgtaccggctcttaaagtcgggggagctgccggcagttcggattgggcactcttggcgtttgactttggaagcagtcgaatattttctctgcaaccgtagctaaatatttaaatgcccctcataacgcaagaaaatatcagatagaatctcggagtccgaatatgttccgctttccgccaaatagtgactgtataggtgttgattattgtaatacagatataaaatatagctgtcagagaagcttattttatccaaaagagaattacaaacaggatctgtattacctgctaagtatttgtaaatcacaacacaccatgtttcaaagactaaatcccgtatgtggcgatcctctaaatttggaaaagatgaaggctgaaataccgcaggacgcaccatttcactatttttagggggttccacttccttgatttcggtaaagaaatccttaaagccaaatattcggctcaatgatttaagggattcgataataaaattatattgcgaaagaggaactccgcattcttcattgataaaggcgttctcgacagaggtactccctctcagaataaaaaaatttttactaaaattgcatatataagcagtcaagaggaagggcaaaagactacaaacagccgattcttccaaattgagcatttgatgaacatacctgaattttcgttctaatggtatgcttccaagaacactcggacaagtagggggtgtaggctccatgccctttttgatttcgttttttaattttttaaaaaggcactcgcattttgtgcgatttcttatcagcaaatattctttgacatcttcaaaagagtcttccaaatcttcaagataccaccatgggtctaatggctgaagcttcttcgctcctggtcgccgggtccgcagcttaaacagcttattgaaatgcgcatcgatatcttgaaagtgatgttcaaattcacgctctatagtttcccagaaggtttgtgtattcttacaaggcatcaataactcattatctgctggacattcactattgctttcttcgcggatgttttgtgctggaatattccgtgactgatatccgtgtatcatatactccacgacggagcctaaggcatgttcttctcgttccaaaagagatgctataatctcccaatttttcatagaactcttccttttttagcattgcttaatttaattcaggcgactaattcgtagaaaaagcgggccgtaaaacaggaaaaatatggtgaatatccctaaatccagatcagaatacagagggggcacagcaaaattgagccccctctgtattctgatttgtcctctgaaaaccaaaataagccgcatgaaaaaaaagaagcgttcgcggcaattgccgagtttgtatatgatagctctcgagccggctactacacactatctggaggagtcaagatgagtacgaaatttctgttccctgattgggagaacgaggatgacgattcgcaggatctctgtggacgtatgcgcgagatggcggaggaagccgcccgacgggagcgccaggggcttccggagaaaaaggagcctgaaccgccggctcccacagccaaaagccctcggaagcgggcgaatttcttctccgatctggtggagcagatcgcaaaagccaaaattctcctgtttaccgaggacggggagccgttcgcctatgacgaagagctgggctgctaccagcccattccccaactgacggcatggcttgcaaacttcttcccggaaatcacgacccggagtcttttggcgaacgatctccgcgaaattgcccagcgcctgacttggcgggaagacctccggtgctgccgcgatgagttcaaccggagtaaagaactggtgaatctggaaaatggggttttcaatctggaatctggcgagctgctggagcacgatccccggttccactttacttaccaggttaaggccagttacctggaagatcctgagcaaatcaaatgtcccgttctcgaagatttctgccgttcttctctcgatggagaccctaaaaagcggcagctgcttctggagatgatcggctacatttgctccgacctgaccgttgggaagtgtgctttcttcctacagggacaaccaaattccggaaaaagtgtcatcgccgagttcatcagtcggttatttgatccatcgctcgtgtccaatgtaccgcttcatcagctaggagaacggttttcccgagcagaattggcgggcaagaaagtcaatatcgccggcgagattgctgggagagccttacgggacatctccattttcaagtctgtcaccggcggcgaccgtatcacgggcgagttcaaagggaaagacctcttctatttcatcccacggtgcaagctgctgtttgcaggcaacacgctaccgcggacgaccgaggcggataccaccgccgcctttgcaaaccggctcgtggtcctactcttcaatcagagcatcccgccggagaaacaggataagagcctgctggataggctttgcaaagaggcggactccatcgtgacccttgcgcttcatgccttgcaggacctcatggaacggaattttgtgtttgctctaccggaggattctaaggcatttctggaatcgtttgtcaatcgatcaaacgtcctgtccggctttataaaggaacgctgtatcctctccccggaggctcgcgtattcaatacggacctctttgcggcattcgtggattattgcgcacagaatgggctggaggcactctcactcagccagttccatgaccttttgtctggaattccaggcgtctacgccaagcgcatccgtatcggaaaagagaaccggcaaggacatgtgggaatctctctaaagaaaagcgaatcccatggaactttggaacaacagcctcgaacgcctgcgtggctaaggggagaaagttccacggaaggtggaccacatatcatttcaaagagggaggaagacgatgcccagcaagaaaaagcgtgaagatctcccgctcttcttatccccggatcaggcagcaaaaatcagcggcctcggcgtcaaccgcatccgccagctgatggaggatgggcagttggagtatctgccagtcggcaaccggcggctgacaaccgtccaggctctgctggactattacaagcgggccaaagtaccggctgcggcctgaaaggatgcgttaccctgattttaccatctggccctaggcgcgtcaagagtaggtgggcggtggtttgcttggagagcaaaccaccgcccacctctaaaaggaggaataatgtatggctgttacagaacgaaccgtgagaaataagcgcaacagcgcgggagaactcactggaaaggccggcactgtgtacgatgtgaatgtcaagtacaagtccggcggaaagagcaagacctattcccgcaagggcttcctgacaaagaaggacgccttacagcatgaagcggagatgaaagcgaagctgacaaacccggcatacacgccgccctctgctgttcagcgaaaaatgactgtgcaggagtacatgacggagtggatcgaccggcatggctctgcaaatctccgccccagcaccgaggccagctatcggagtcacatgaagaaccacatcttcccctatatcggagatgtatttctgaaccagctctccccggccatgctggacgatatgtaccggcagcttgctgaaaagggcctctctcagtcctcggtcaaatacgcacaccggatcatgggcgtctcactggaacatgcccgccggtatcactacattagcagcaatccggccagggatattttgacgaagttcggaaagcagagcaagacgccagatccttacacggtagaccagatgcggcagctgctggctgttgtcatggggacggagtgggagctgatcgtagtgctgggaggattgtatgggcttcgcctcagcgagatcatcggactgcggtggaggaacgtggatctggctgaaaatacctttggcgttgtggagcagctcccattcaacacgcctgcgaacaccacagtgatctctgagatggctcccgtgaaatccagtgagcggacgcttcccattacaccgctcgtcagaccatactttgagcggcatctggaactccagaaggaacagaagcgttttgcaaagcagtcagggaatctgtactttgacaacgaccttgtattcgcaaagcctaacggctctcccaagcggcgggagcggatctccgcgaattttggacagttgctgcgtcacgcagagatgccccatatccgctttcacgatctgcggcacacagcagcaaccaatatgcaccagctgaccggagacttctatacggttggacagatcctggggcacagcctgaaggggatcggcattcagctccagctctccaacaacctggaagccgtcacggcgcagtatgtagatgtgagaatggagaggaagctatatgtcctaaacatctaccatgaagcggtcctgggttccagtgagaaaacatgaagcgcggaggtgcgcgcgatgctcatgcatcgcgcgcacctccgcgcttgccgcagcaccgcagtgctgcgaatctctttttgtgacctctcgaactgtggaaatctcacgtattttgatattgctttttataggtcgcttttgaggtgacgggcaccatttgagcaccacagcaaggaaatcccgaatatctcattcactggccgggcaccacaaacctcggcaccatgggcaccattttgctgctgacgatgggaattgagaaatcttcgggaaaaatagaagtccttgaagcattgtgcttcaaggacttcctggcggagtgggtgggattcgaacccacgtgcccttgcggacaacttgatttcgagtcaagctcgttgcgaccacttcgataccactccgtgtagaaatatgcagtttttatgaatggatcacatgatttcgagtcagccccgttatgaccacttcgataccgctgcatatctagttgtgagaacgcaaatcaggataactgtgagcattttgttagcgtttttccgaagcgccgctcacacccgcgcccggaagcccttgggagacatagccttttggctgttagcacgtcccgccgacgtagcgatttcaagtcaagctcgttgtgaccacttcgatgccactctgtacagttccgtcctgcgagacgggaagcggttttattatggcatattttcgggaaagtttcaaggaaaaccttttaacttttcgttcgtttctcttcgccccgcttttaaccaccgggcggaactctggacgtgctgcccggatagaatgggcctgagacatttgacaggagggatcgccttgcgtccaacagtgtttctctggggcctgccgggccagtacatcaattacgagcgtgcgctggagatagcaggtggacggcccctggcctctccggatctgcgggatgcggtgcggtgtgccgccctgttgttgcccggcggcggcgatatggagccccggcgctacggccaggcaaacaccgccagccgggggctggagccagagcgggacgcgggagagctgttcctgctggagcagttcattatggagaaaaagcctgttctgggaatttgccggggactgcaggtgctgaacgtgtttttcggaggcacactgatccaggacctgcccggccacagccaggcggcgggtcgggaccggctccaccgggtacggacagccccctctcccctgcaggaccttttcggagagaccttggtggtgaacagcgcccatcatcaggcggcagaccggctggggcagggactgcgggcggtccaatgggccatagacggcacggtggaggcggtcatccaccagtccctgccggtgtggggtgtccagtggcacccggagcggctggccggccccttatccctgtccggagccgcagatggagggtgccttttcaccgcctggctggcgctggctggtggcacaggacaatcttagaaaaaaattgcgggtttccgcttgacagatgggcttgtccatggtaatatatctaagctgacgatttccacggagggcagacgcaggtgtagcacaatggtcagggcaccagccttccaagctggggatgcgagttcgattctcgtcacctgctccaatcaaattcgcgccagtagctcagctggatagagcaactgccttctaagcagtaggccaggggttcgagtcccttctggcgtaccaactccttccggggcggtcggtcagcacgcatcctgtttaggatctcgatatgtggtgggtgtagctcagttggttagagcaccggattgtggttccgggtgtcgtgggttcgagtcccatctcccaccccacaaaagaggggatcggggtcaccccggtcccctgttttcctttccattggggcgtcgccaagtggtaaggcaagggactttgactccctcatccgctggttcgagtccagccgtcccagccaagactttccagcccgcccgcattggacggccgaaatagaataccatgtgatccgttagctcagcaggcagagcaactgccttttaagcagtgggtccggggttcgaatccccgacgggtcaccaaaaagaaagacacgactttcgtcgtgtctttctttttgggtttcgcaggccattggcccgcgaaacccttcggcgattcaaatgctcggcggaaatgaattctgcctccgccaaggttccgcctgcggcaaaacgcttgtactgcgcaaacgcaccgtcctgctgtgcggagctccaatgtccgcatctcttctgtcaacacaagctgtaaaaacctcctgaagggctaatgcttcaggaggtttttacagccggaaaataccagggattgttcgtaacgggttaccagcaagggatatatcaaatttcgcttcgattgccctgtaagatttggagtcgctgtgaagtctccgccagcaatttcaatgccgatgcttccagcaccgcctgactggccgcctgcatgatcgggcagatctgtccccccaagaactctctgttggcttcgcacggaagcgattcattcgcccgtgccggggcagccgctgtggtgctccgcccgctcccgtcccaggctgcttacagggtcatctcctctcccggctgaaggactttggcggcaaatcccgcctctttgcaggcggcggcgaatgcctccggatcctgggtgatggcctggaaggtgttgtagtgcatggggaccgtcagtcggggccggatcagcttcactgcccggagggcatccgccgggcccatggtgtagaaatctccgatgggcagcagcgccacgtcgatgtcctcgtctgccagcagggtcatatcggtcatcagggccgtgtctccggcgtgatagatcttcctgccccccatctcaaaaaggaagccgcaggcaggacagcccgccgcaccgccgccgtggagggcctggaaaaacttggcgcagccaaaggacaggcggaccgtgccgcccagatttccggcgacgcatgccacccccgcagggacaaacaccgcatccgccagatccgctgtgcagcagaccggcgcaccggtacgtctggcgatggcggctgcatcccctacgtggtccccatggccgtgggtgacaaaaatcacgtccgggtccaccttctctgcccattcaggacggccagccccggtgaggaaggggtccgtcaggactttgtggacgccgtcatccagcagaaagcaggcatggcccagaaattgcagcttcatatatgcagcactcctttttccaagatgggacggacagctgtcagagcctccgtcggtcggttctcttgatgggatgatatcatatccggtgggcaaagtaaattccagcctccacgaaaaaagcggcgccgggctttttcgggcccgacgccgtccgcatattccatctttcttacagccgggccaggatggcatcgcccatggcagcgcagcccaccttctcacatccgggccgccagatgtcggcggtgcggatgccgtcgttcagcacttgattcaccgcagcttcgatgcagtctgcctccgccgccatatcgaagctgtaccgcagcatcatggccgcggacaggatgcaggcgatggggttgatgatatcctgtccggcgatgtccggggcagagccgtggatgggctcgtacagcccccgggtgccgtcccccaggctggaggagggcaccatgccgatgctgccggtgatctcgctggcctcgtcggacaggatgtcgccgaacatgttctccgtgacaatcacgtcgaactgggcgggatccttgcagatctgcatggcgcagttgtccacgaacatctcccggtattccacgtccgggtactccgccgccaggcggtgcatcacctcccgccacaggcggctggtgtccagcacattggccttgtccacgcaggtgagctttttctggcgcttgcgggcggtctcaaagccgatgcggccgatccgctcgatctcgtgctcggaatagggcatggtgtccacggcaaccttctcgccgttttcctcgtaggtcctgtgctccccgaagtagacgccgccgatcagctcgcgcaccacaataaagtcaatgcctttttccacgatggcgggcttcaggggcgaggcgtccgccaactggggccagattttggcagggcggttgttggagtaaagccccatgccggcccggagccgcaggaggcccttttccgcccgcttgtcaccgggcaggccctcccacttggggccgccgatggcccccagcagcacgctgtcgctttgcaggcacttgtccagttccgactggggcaggggatccccgtaggcgtcgatggcctcgccgcccatcaggacttttgtataagtaaaggtgtggccgaatttctcagccaccgcgtccagcacccgcagggcctgggtgacgatctccgggctggcgcagtcgccgtagatcaccgcgatattcttctccatactgccgcctccttaccgcgcctggatgctggccatcaggccgccggagcgaatgatcttctggatgaagggcgggaagggctccgcctggaaggtctcgcctgtggtctcgtcggtgatgacgccggtgtcaaagttcacagacaccgtgtctccctcccggatggcagtgctggctgacgggcactccaggatgggcagaccgatgttgatggcattgcggtagaaaatccgggcaaagctggcggcgatgacgcaggcgatgccggcggtcttgatggccaggggcgcgtgctcccggctggagccgcagccgaagttctcgccccccaccatgatgtcgcccgcctgcacccgggtgatgaaggtcttgtcaatgtcctccatgcagtggtccgccagctcccgggcattctgggtgttcaggtagcgggcggggatgatgacgtcggtgtcgatgttgtcaccgtatttgaatacagaacctcttgcttccatggtgttcaaacctccctgggatcggtgatgtggcccgtcagggcgctggccgccgccgtggcggggctggccagataaatctcgctgttcacgtggcccatgcggcccacaaagttgcggttggtggtggagacgcaccgctccccttccgccagaatgcccatgtagccgccgagacacggcccgcaggtgggggtggagacaatgcacccggcgtcgacaaaggcggtggtgtagccccgctcgatgcaggtcctgtacacctccatggtggcgggaatgatgatgccccggacgccgtcggcgatgtggcggcccttcaaaatgttgtaagcggcctccatgtcctcgatccggccgttggtgcaggagccgatgaccacctgatcgattttgatgtccccgccctcggcggccgggtgggtgttctccggcaggtggggccagctgacggtgggcaccagggtgtccaggtcaatggtgatggtccgctcgtactctgcgtccggatctgcctcgtatttcttccattcccgccggctgcggcccttcaggtacgcctcgcaggtctcgtccaccgggaagatgccgttcttggcaccggcctcgatagccatgttgcagatgcacagccggtcctccatagtcaggctctgcacgccggggccgatgaactccaggctcttgtagagggcgccggagacgccgatgagtccgatcaggtgcaagatcacgtccttgccggacacaggccgccgcagactgccggtcagctccacgcggatggcggcgggcaccttgaaccacgccttgccggtggccatgccggcggccatatccgtggagcccacgccggtggagaaggcccccaccgcgccgtaggtgcaggtgtggctgtcggcgccgatgatgcagtctccggcggtgacgatgccctgctccggcaggagggcgtgctccacgcccatcttgcccacgtcgaagaagttgacgatgccgtgtctgcaggcgaactcccggcactgcttggactgctgggcgctcttgatgtccttgttggggacgaagtgatccagaacgatgttcacccgggtcttgtcgaaaacatcgcaaaagcccgccttttcaaactcgttgatggccaccggagtggtgatgtcgttgcccaggacaatatcaaggttcgcctcgatcagctgtcccgccttgacgtgctcctggccgcagtgggcagccaggattttctgtgtcatagtcattcccatgggtattgtgcctccgttctctgtgatgaagtccaggggtctcccccgctgtttaccggttattgatggcactgaccagcgcccggacgcctgccacgatgatgtccgtgtgggtgccgcagccccaggtctctctgccatctggccacttcagccctacgtagctgcaggcccggctgtcggtgtcagggtccagtgcgtgctcgctgtaatggatcaatgtgaagtccatgcccgctgcctgctcgatggcattggccaccgcgtccaggcggccgtttccggcggcgccgcactggatcatccggctgccgcggcgcagagtcaggttggcggagatggacccgtcctggttctgtgtgtagtgggcggcagtgacattcagcggggccgcgttgttgacgtagttgtcctcaaacacctccagcacctcctggacggagagttcccggtggtcgtggtcgctgacctccttgacccggtagcccagctgctcccgcatgtggggcggcgggttatagccgtagttctgctgcagcaggaagccgatgccgcccttgccgctctggctgttgatgcggatgacgtccgcgtcgtaggtgcggctgatgtcgtgggggtcgatgggatataggggcagtcccaccggtgctggtggtgctccttccggtaggtcatgcccttggcgatggcgtcctggtggctgccggagaaggcggcgaacaccaggctgccggcgtaggggctgcgctcatagacgtgcatccgtgtcacccgctcgtatacctcgcagatagcgggcatatcggagaagtccagcttcgggtccactccgtggctgtacatgttcatggccagggtgatggcgtccacgttgcccgtgcgctccccgttgccgaagaggcagcactccacccgctgggcaccggccagtaccgccagctccgcgtccgccacgccgcagccccggtcgttgtggggatgggtggagagaaccacggcatcccggtacttcagatgcttggagcaccattcgatctggttggcgtagatgtggggcatgctcatctccaccgtcaccggcaggttgataatcatgggacggtccggcgtgggctgcatcacgtccagcactgcgttgcagacttccacggcgtactccggctctgtgccggtgaagctctccgggctgtactcaaagaggaaattgccctcgtactcccggctcaattccttgatgagcttggcaccgtccacggcgatttgcttgatctcctccctggacttgtggaacacctcccgccgctgggcctcgctggtggagttgtagaagtggatgatggcccggggggcgcccttcaccgcctcaaaggtccggcggatgatgtggtcccggcactgggtcagcacctggatcgtcacgtcctgggggatgcggtcctcgtcgatcagcttgcggaggaactcatactccgtctccgacgccgccgggaagcccacctcgatctccttgaagccgatcttcagcagcatctcgtagaactccagcttctcctccaggctcataggcaccaccagactctggttgccgtcccgcaggtccacgctgcaccaggcgggggcagtctcgatatggtccttctgcatccactcgtacacgtgccccggctccaccggcgggggatagtagccaatctgatatttcgtcgcgtccatcatgtcaaagtcctccttccaaggtcttgtctttggaaggaggacaacaaaaaatcccatctctccaaagaccatcagtctttgagagacgggagcaaaaaatgctgtacccgcggtaccactctcattgccgggagacccggccactctgtacgatcggctcctcctgaggggggcgaatcgcgtctgcatgataacggacagcggccgtccgcacctaaaggcgacgcctctcagcgcggctgctcaagggccagtgacgcggtcccctccgtaccgccttgcaccgaccggcggctctctgaaacggggcgtgggatcgccttttccccttcatcgcattttggaagatgggaagagtataacagctccgccgaaggacgtcaagtgaggaaatctgtcctcacagcggatttggtacggtttgacagacatctcttggcaaagcgcgccgtctcttgtgaaaaccgcaagaaaaaatcaggacggctgccgccgtcctgaagcggcggcctccctccggaagaccccgctacggaagcggaccactccccaggagccgggagggcgggccggttgtatcgtgcatcccgaaaaatgcccagcacctcacagcgccgcacctgtccgccagatctgcgtctccgtggccactatgggtacccggcggtcatggaggcccactggtacgcggggctgcagcaggcggtcggggcataccagaatggcgggcccctgatagtactccaggtagcggtcgtaatacccgccgccgggggagcaggtcacgccaaggtacgagaggcgcagatgcgcacccgggtggagggcgtcaggtcaactatgcggacctgcagaccgggcggggtcctatcacgatggagccccagttccccgtgatcccggggctggacatcgtggaaatcgcggaggctgtcggaaactgcgctaccgtgctatataatgaggacaactatgccaagctgcccgaggaccttcagacggttctgcgggagtgcatggaccagatccgggaaaagaacaacgagatcacgcgtgatgaggatgcctattatatcgagaagatgaaagccgaagttcccgggctaaccgtgacggaatccgattatgggtctttgctgctgtgggccgtgcggtccatgaggagctggtcgccagcgtctctgatgaagcgctctgcgatgcaatccaagccctggcctgagcaaggaaggttccctccctgcaagggtctcgtttgggagacaaatgggacccttgcagaaaacacaggggcgcccactgaggtaaaacttataaaaaagtatatgcgccattttccttggccattgtgcacgctcctctccgccggtcttatgagagatatcatacagccgggagggaaatgcgacaatgccccgccgggccgggcgattttcagcttgtctctttgccggttgtgcggtaaactggacgtatcgcggcgccggacggggtgcagccgtggataccggagcgcgccggggcgcctccggcatctgcatccggtggaagcgcccgcatctgcatgaaacgagaggaagcagacatggactatctggacttggaagcccccggcctgacggcggggaatgtggaaaaaatcgccgcgctgtttcccgccgccgtcacggagacgcgaggcgcggacgggaaggtgaaaaaggccgtcaacttcgaggtcctcaagcagctgctggcccccgacgtggcggagggggaggatcgctacgaattcacctgggtcggcaaacgggccgccatggccgaggccgcccgccccacctccagaaccctccgccccgtgaaggcggacagccgggattgggacaccacccggaacctctacatcgagggagacaatctggaagtgctgaaaatcctccaggagagttatctgggcgcggtgaaggtgatctacctggacccgccctacaacaccggcagcgatttcatctatccggattcctttgtgatggaccgcggcgcatatcacggtgccagcggataccgggacgcggaggggaagatcaactttcagcggaaaaacacgttttcggacggcaggtatcactccgactggtgctccatgctcttttccagactgctgctggcccgcagcctgctctccccggacggcgtcatcctgatctccatcgacgaccatgagtcagcgaacctgaagaagatctgcgacgaggtgttcggcgaaagcaactacctgaaccagttcgcgtgggtctccaatatcacgggccgccagatatccggcagaggcgcggccaaaacctgggagtccgtcctggcctacgccagggacatcgacgcgtgcggcagcctgtccattgacatccgcttcgccagggagaagatgcccgatgcgtacaagggctttcgcagggacgttcggacggaccggctgggcccctttgcggtcggcgatcccctctacaatcataatcgcaagttcaacgaagagacccggccgaacctcgtgttctccatcttctatcagccccagacccaggagatctccacaggcgccatcggggagaggcggcccgggtgggtcgagctgccgccccatgcaaatggggatggcgtgcacaagtaccatgcctggcggtggtcccggcagaagattgcggacgagccatataatctgatcgtgctccccacagcgtccggtaggtatgagatccacaccaagatcagggacttcggcaggacgctgctcaaggacgtcattcccgacatccccaacggagacgcggagctgcggaagctgttcggcggccggaaattgtttgactacccaaagtccgtggacctgttgaggaccctgatcggctctgttccggggaaggatttcgtatgcctggacctcttctccggctccgccaccaccgcccacgcggtgatgcgcctcaacacggaggacggtggccaccgcagcttcattatggtgcagctgcccgagccctgcggtgagaagagcgaggccgcccaggcgggcttccagaccatctgtgagatcggcaaagcccgcatccgccgtgccggggatcagatccggaccgaattccccggtgcctgtccggacatcggcttccgggtcttccgggtggacgagggctgccggaaggaggtcctctatcccccggaggagatatcccagccgctgatcgggcagacggtgtccaatatccgggaggaccgcaccgacctggatctgctctatgcctgcctgctggacctgggcctgggcatccacctgccccacaccagccgggtggtcggcggctgcaccgtccaccgggtggacggcggcgtcctggcggcctgtttcgacgctggcgttccggacacggtcatccgggacatagctgcttcccgcccccagtgggctgtcttccgggacagcgccttcgcctcggacgccgccaagatcaacgtgacggagatcttcaaaagcctgtcccccggcacccgcgtccaggtactctgagtgcagaccgtccgcctggttccattccgcagaaactttccccgtcttgcccggatgtgtccccagcgcaccggacataaggaggtgacctcatgaagctccaattcaagcaccagccctttcaggcggaggcggccgcagcggtctgcgatgtgttccgcggccagtcactgtgcgcccaggcacaccggcagggcctgggcgccgcggccgacaggccgctgtccctggcagggaccggcaccggcctgtgcaaccaacccctggctccggagctgaccgacgcccggatcctgaaaaatctgcacgcggtccagcggcgcgtcggattgcctctgtccaaggccctggccgggccggggatcaacctgtccgtggagatggagaccggcaccggcaagacctatacctatgtgaaaaccatctacgagctaaacgcccgctacggctggagccggttcatcatcgtggttccgtcggtggccgtccgggagggcgtctaccgttccctgcagacgacccaggagcacttcgccggggagtacggcaggcggctgcggtttttcatctacaactccgaccgcctcgcccaggtggaccgcttcgcctccgacagcgccattcaggtcatgattatcaacatgcaggcgttcaactcgggcaggaaccagcggatcatcgaccagcggccggacagcttccggggccgccgccccatcgacgtcatcgcggccacccggcctattctcatcattgacgagccccagagcgtggagggccgccagactcgggagagcctgcgcaagttcaacgccctgttcaccctgcgctactccgccacccaccgggaggcgtacaacatggtgtaccgtctggacgccctggacgcctataaccggcatctggtgaaacggatcgccgccctgggggtgaccttcacatcctcccccgccgctggcggctttgtctatctggagggcgtggacctgagccgggacagggcccccgccgcccggatcggttttgaggtcaaaggggcgtccggcattcggacggtggtgaaacagctgcgccggaaggcggatctgttcgcggcgtccaacggcctggccgaatacgccgaccgctatgtggtggcagagatcgacggtcgggacagctcggtgacctttctcaacggcctgaagctatatgccggtcagttcagcggcggcgaggagcggacagctctccagcgccgggtgcagattcgggagaccatccgcacccacctccgccgggaacgggagctgtattccaggggagtgaaagtgctgtccctcttcttcatcgacgaggtgtccaaataccgcctgtacgacggggacagcggcagcggccgcagcggcgagtacgccaaaatgtttgaggaggagtacgtcgccgtggcggaggcgttccggcgagagatcgacgacccggcgtaccgggcctatctggacggcatcgatgcccgcgagacccaccagggctacttctccgtagaccggcggaagggccgccaggcccgctttgtggagggaaagatcgaccgcaagagccgaacctccttcgacgcggacgcctatgacctgatcatgcgggacaaggagcggctgctcagcctggatgaacctgtgcggttcctcttctctcactccgccctccgggaggggtgggacaaccccaatgtgttccagatctgtatgctgaagccccagacggagtcggagatccgcagccgccaggagatcggccgcggtctgcgcctgtgtgtcaatcaggagggcgaacgcatggacgaaagcgtcctgggcggggcggtgcaggagctgaacaagctgacgctcatcaccgatatggagttcggcagattcgcggaggccctgcagcaggggctggcggcgtcccttgccggccgcccccggatggtggagccgggcctgtttgccggcaggctcctcactggcaccaccggggcacgggtccgggtgacgcgggagctggcagatgagatctgtgccgctctccggaaacagggctatgtgaaggaccgcgtcctcaccggcagcttctttgcggaccgggaccggggtgccgtccggctgggcggaagccttcaggacctcagcgccgccgtggcgcaagtcctctccggcgtctataccccccgggccatccccgcggagaacgcccacggcggcaacgtcaccgcccgggcggacccggagaagctgcagaccgaggcgttccgctccctttgggcgcgggtcggccccaagtccttctacaccgtctcctttgacacccgggagctgatcgggaacgtcatccaggctctggacgcgcatctacaggtgacccccgtctctgtccggacggtgtatggcgagcaggcgacgcagctgcagtcccgggaacagctgcttcagggccgggccttccgccgcagggaaagccgtgtgcaggccgccggtcccccggcgccgggcggtgtacggtatgacctagtgggcaggctggtggaggaaaccggcctgacccgtaccactgcggcagccattctccagggcatagcccctgagacatttgccatgttccgcctgaatccggaggatttcctcctccaggcctccaggctcatcaaccgggagaaggcggccgccgtcgtccggcacatcacataccaccggctggacgcgtcgtatgacgccgccctcttcaccaatgccgtccgccggggcaggctggggtgcaccgccgtgcccgccgcccattcgatctcagactatgtgatctgtgacaccgacagggaacgggcctttgccgaggcgctggaggccagcgaggcggtcagattatatgtccgacttcccaagtccttcttcattcccaccccggtggggcggtacacgcccgactgggccatcgccctccgggaccgcgcaggggatcccgtctatttcgtggcagagaccagcggcagggccccacagccccagggcgtggaggcggcgaaactccagtgcgcccgcgcacacttcgccgcggtcagcggcggagaggtgatgtgcggcgccgtccgtgacttggatgagctcctgcgcatcgtgggctgaagccccggggccgcacagtatgcacggcggcgtatggaaggccccccgctatggacagagaagcgcggcctgaaatcaagtgatttcaggccgcgccggcttgtgtgcagctgtgaggtctgcaagaattcgaatacactgccggttccccggctttcagcaagcgggccgccgcagcggcacgctccggaactccggcccggcggagtctgtttgagccgccgcatccccggtgcgccgccaaagccggcccccatctcagggcagaactgcctgtgccaggcggttgtcaatgccctgtcccctcccccgcccggggtgcgccgccccgcccccgcagacggcggaaccgccggtgagaagcagtcttcccgccgttctcacgccgtcccgtgggggatgatgaccttctccacccggatcttcccatcctccgcctccgccgtcatcatggtgatctcctgatggaaccgccgagggccgcaggagcccgggttgagccagaggacgccgcctttctcctcctgcacgtacttgtgggagtggccgaacaccaccgcgtccacaccggccaggtccgccgggacctcctttctgttgtggaccatgaaaaaggtcacgccgcccagggtaacggtgagatcgtgcgggatggcctccgcccagtccttgtcgttgttgccccggacgatgtacagcggcgcatactgccgcagctcatccacgatgctctgcctgttgatatctccgccatggaggatggcgtcggcggtctttagatgctccgtgacctccggccgcagcaggccgtgggtgtcggagagaatggcaagtttcataggtttcccctccccctcagatgataatgccctcgcagtggtcgatctcgtgctggataatctgggccgtccagccggtgaaggtcttgatccgctcctggaatttttcgttctgccagcggaccttgatggactcccaccgccgggctctgcgggtgccggagagggacaggcacccctcctccgcctcataggggccggcccttttcacgatctccggattgaacatgaccatatagccgccctggttgtcgaaggcgatgatgcgcttgttcacgccgatcatgttggccgccatacctacgcagccgtccctgtggacttccagtgtctccagcagatccgccgccaccggcaggtcctccggagaggcgggctcggccttttgggccagaaatgcctggtctttgcagatgtcccgaatcatgatgggtcctccttgtgtcgttgaatcgccgccgctatggtctccgccgcaatgcgggccccctgcccgctggggtggacgccatcggcggcgtagaggtcctgcgtgccgggcagctggtaaaaccgccgccccacgtcggcaagcagggcgcggttttcctccgccgccctgcggtacgccgcggacaggttccgggccatcccaccatagtcccatcccttggccgacagccgggccccacccttctgataggcccaggtggcatagagcaccgggatggccccgttctcccggatctgccggcagagccgctccacgctggcgaaaaagctcccgggagcggtgatggggccgtggctcatttcctgcagcaccacatagtcccactgctcctttgcaagcgccgcctgcgttcgggcgcccagccgggtgttcgggttcagatgctcggacagccgggccccgccccgggtatggcagaccacttccgccccggtcagttccgccagaatgtccggcatatcttgggcagaggtgaggctgttgcccagcatcagaatccgcatggtgctcctccttgtctcgtttccgtgcgcgtctgcgcgaaaggctcccgccgtcaatgctcggggcagcgctccataagccccctgccggatttgctgatatccccatatcccgccggagccgcagcggcccgctctgggcggcaccggttctcccattgatggttccctccagcaggcgcacggtgccggggaacgatgcgtttcatggggcgaaatcccggcggcaagggccctgtgcccctgctccgcgaagtggcacaccgtcataggccggggagacgttccaccgcccggcaagggtccggcagcacccggcgaaggtccgggaagcggcaatgagcatttggcccggcacccattcccccggggaccgggacggcaacgcgaacagagggatcttcccccgtgccagctccaggccggtcaggaatcgctccatccgctccgccgtggccttgggcctgcggccctgcaaaaggtcattggtgcccagcatcacgatcagcaggtcggtgtccgccggaatgtcaggtgccgcgtcggggagctcccggccgttggcgccccagttgcccaacacccatccggtttcggccgccaggatgtccacccatcagctgcccggggcacagcgcccgcccagccgggaccggggatcgtagccccaggtgctggaatcggcgaaacagatgaccttcctcacagctgtccctccaaggcacaagccccggacgtgccctcaccttccccgcatcccgtttaggccggtgcgtgcggtgctattctgcctgcggcatttgtgatttcatcacggtgcaattcatagatatgcggtatgatgaacccactcaatttagggaggcatgctatgaattccgtgaaaaagcggcgcagagccgtggtggacccgtcagcctgtgtggcctgcggctgctgtgtgaaggtctgtcccctgcaggccattgagatcgtgcggggcgttatggcccaggtccggcaggacaaatgcgtgggctgcggcaagtgcgccagggagtgtccggccagcgtcatcaaaatccgggaggtagaggcatgaagaagcactggtacgactatctgtggatcgcttcgctcctgtacctcctgctgggatttttcaacattctgtttgcctggctgggcctgctgtgcttcttcatccccctcatcatctccgtggtcagcgggaccaagagctactgcaaccgctactgcggccggggccagctgtttgggctgctgggcgggcgcttcgggctgtcccgcaggaaagacatccccaaatggatgaaaagcaaggcgttccgatacggatttctcgcctttttcttcgccatgttctttctgatgctgtggaacacctatttggtgttcgccggtgtgcgggatctggggcaggcggtcaccctgctgtggaccttcaagctgccctggaactgggcctaccacggcacccttttccatcccggcgtggcgcagttcgccttcggcttctacggcgtcatgctcacatccacagtcttggggctaatcaccatggtgctgttcaagccccgcagctggtgtgtctactgccccatgggcaccatgacacagctgatctgcaaagcaaggaacagccgcacatgaccgtgccgtatcacgcggctcaatcctgcaactgccgcagcctgtcctcatcaaggagccggaccatgccccgggagagccgcaccatgccctcgctctgaaaatagcgcagcatcctggtaatcacctcccggtgggtgcccaggtgattggcaatggcctcatgggtgatcttcagcacgctgctcccctcgatggaagcctcctccagcagaaaggccgccacccgcttgtccaggctcttccacatgacctgctccatcagccacatgacctcggagaaccggctggccatcagctcgttggtgtagttggccacaggcgccgacgtctccatgatgtcctggtagacctccgcgggaatgacccagaggtccgtgtccttctccgcctggatggtgacctcaaactggatggagcgcatgatgcaggacgcagagaacaggcacagatcccggtcgaacaggcggtaaatggtgatctcccgcccctcatcagagaggatataggcccggagctgccccgccttcaccaggaggagtccggtgcagtccatgtccccgttgtgcaggatcgtccccttcttcacggttcggaaattcagattgctgcggatccggtcctgctggtctgtttggagcttgttccagatgggaaaatagtcctgaaaggtcattccgtgtccctcctcatcgtgttctcagtatagttgacaggagctttgctgtcaaccggcccgcttttcggaaaatcccgtgttttgggtgatgtcgtcacagaaaaatcgcggactttcggttatactaggaccaaaccaaggaaaggagctgaccagcatggcggctatcaatctaaacaaggaacaattccagcagatggcagagggcggcaagcccatcctggtggatttctgggctccctggtgcggctactgccgccggatcgggcccgcgtatgagaagatcgcggacgaatacggcgaccgtctcaccgtggcgaaggtaaacatcgacgaggaggccgcgctggccgaggcggcgcagatcgaggtcattcctacgctggtcctgtatcgggacgggaaagccgtggattctatcgtcaaccccgggtccaaagcggccatcgaccagttcatccaggaggctatggcgaagtaaggaggcggaatccatgggcgaaactcgtgtctacgacatgatcgtggtgggcggcgggccgggcggctatacggcggcgctctatgcagccagggccgggctggatacactggtgctggagaaactctcggcaggcgggcagatggccctgacggaggagatcgacaactatcccggctatgaggacgggatcgacggcttcaccctggcggagaagatgcagcggcaggcagagcggttcggtgcgcagacagcgtacgcacaggtggagcgcatggaactgaccgctgcccccaaggcgctgaagaccagcgaggggaccttttatgccaggacggtaatccttgccaccggagccaatcccagggagctgggccttgcaggcgaggaggccctggtgggccggggtgtggcctactgtgccgcctgcgacgggatgcgctacaagggcaaaacggtcgccgtggtgggcggcgggaattccgccgccggcgacgccctgcttttgagccgtatcgccgaaagggtggtcctggtgcaccgcagggaccagctacgggccacgaagatctaccacgagccactgatacaggcagagaacgtggaattccgctggaacagcactgttacggagctgctgcacgaagagaagctgaccggcatccggctgcgggatgtgcagaccggggcggaatccgtccttccctgcgacgggctcttcatcagcgtcggcagaaagccggccacggagctggtgaaaggccagctggagctggatgccggcggctatgtgacggcggacgaaaccacaaggaccaatctccccggcgtctatgccgtgggcgatgtacggacgaagccgctgcgccaggtagtgacggccgtggccgatggggccatggcggtccacatggcggaagaatatctggcaggcggcgcctgatcgaagaaatgcggcagagaacggctgaagtcctcccgcatatatgcccatcccgttcaaaatgcaggcatccgggatgcaggcggcctgaaaagaacacagctgcccggagtatctgatggaacagattcctccgggcagtttttgtatccttgttttgcagagcggcaggccacggaaaaggaacctgtcatgcggcaaaccgcgcggtccggcggagccctttgggcaggatcctcagttctgttccagcagccgtctgacttctgaaatactgtccaccggccgggcacaggcgccgttccggcatagatagtaccggacgcctgtctccggaatcggataggcctccgtgaagggggcaagctcctccagcggctttgccgtctccggcgttttcaccagcaccgtcagttcgggcctggaggcctcccgcagaaaagccgccaactcctccggcatggtccgggccgcgcagaccagctccgccgagggccacagctcctccagaaacaccagcatggcaaaaccgtgtccggcgggataggtccgggtggccccagccagatagcccagctgcagatcggcggcggtccgccagcgggcctccccggtgaggcgggccaggcgggagagaaccagcgccgctgccgcattgcccgacggcatggccccgtcataggtctcctttgtccgggtgatgagctgttccccatccgccgcgtaggggtaaaacccgccgtttttcccgtcaaaaaactgctccagcagccgtgccgtcaggtccccggcctccgccagataggcggtccggaaggtcacgccgtagagttccagcaagccccaggcgcagaaggcgtaatcatccagctttccggggtgggccgcctgccccgcccgccatctggccagcagacgaccgttttcctctgtgaggctccgcttcaaaaatgccgcggctcccacggcggcgtcccgatagcggggctcatccagggccagtcccgcccgggccagggccgcaatcatcagtccattccatgcggcaagcaccttgtcgtccctgtggaggcaggtccgttccaagcggtaggcatacaccctctcccgcaggggcctgatgcgcaccggctcccgctggacctgttcccggccgattaggttgaggatatttttccccgcaaagttccccgtctcggtgacgccgtaccagccgcagaacgcctctgcgtcctccggtcccagcaggtctctcagctcgccttcggtgaatacatagtatttcccctcctcgccctcgctgtccgcgtcctgtccgcagtagaatccgccctgaaaatcacgcagctcccgcaggacgtaatccagcgtgcggcggacgatctccccatagagcgggcgccgggtctgctgataggcctccgtataggccagtgccagcagggcgttgtcatagagcatcttttcaaagtggggcaccagccacatttcatcggtagagtaccgggcaaagccgccgcccacatggtcgaacaggccgcctcggtacatgctctccagcgtctgctccgccatggccccggcctgggactcccctgtgcgccgggcgtaccggagcaggaagatcagattatgaggcgtggggaattttggcgcgtgcccgaagccgccccagcgggtgtcaaaactccgggcgtaaaggcccgccgccatgcctgccagtgcccggtctggaaagccggtgcctgcgccctccgcttccctgagccggtcggtcagcgcctctccggcggtcagcagactgcccctatcttcccgccacaggcgcgccgcctgctgcagcagggacagcagcgcctgtctggggaggtacgtccccgcccagaagggctcctgctccggcgtgagcagcaccgtcagcggccatccgccggagcctgtcatagccacgcaggcggccatatagaccgcgtccacatccgggcgctcctcccggtcgactttgatcgggataaaatcccggttgatcgcctccgccaccgtctcgtcctcaaaggactcatgggccatgacgtggcaccagtggcaggtggagtagccgatgctgaggaacaccggcttgtcctcctcccgtgcggtctggaatgcctcgctcccccagggccgccagtccacgggattttcccggtgctggagcagatacggggattgttcaaattgcagccggttgggcatgggtcgtcctcctttgaccgggcggcgcactgccgcccgcatggttccgcaggttttccgtccagtgccgcgcttgccccctgcttatacaaggcgttttccccatccggcacgggccgggggccgcagtttgttccgcggacttccgcctcagcgggccagatccggcgggagcggccgggcaaagcgcgcccctggtgtcggaccgggcaggtagattccggcaagtagcgccctggcccgccaaggtatccaggtcgtcatgccttcccccgccaaaaagtcttgcagtgggccttttcggtgcggttgaaggcgatcatccggcgcagcagcgtgtaatccacgtccctctcccacgggatgcggaacagcattttgccccggcatagccgccccgggcgatttcccggaaaaagccctccaagcccgccccggagaaacggccagatgcccggcggagacgctgatcccgacgatgaacgtcccatgatctgtgaacacaggctggttccatgcaaccctgagctccaggccggaaaacgtccgttccgcccactccagcacctccgccatacggacgcggcgctgcggcgctttcgcctgcgccagataatctgctaaggtctccaatccacccgccccttcacatccaaagagcagaaatagtctgtgcatttcaggagggattatcacccctcgcctcaagcagcggcgccccgggcggccgctcttccgtcaggacctgcagcctgttccggaaacgagggcctccttcaggttcatttcctgccctccttgcccaggctgatcttgtatccatcataagtgaaaaagggccgcacccgggcggaggtggaccaggtaactgcctgtctcaccgggtacacgctggcggacctcgcccggctggagcggtccagcgtcacctgcgctcacttttttcaacgtgcccccgccatgaatcctgaccgtgccctcatcaccgacaaggtctgcggtgtccgggtatgggacctgctgatacgggatatccggtatctgggcaagctggtggacgagctgcccaagggacccctatggagcagattctccggaaaaacaagtatgtcccggagcttctggcctttcagaaactcggggctgttttcgcctcgagagccctttgctttgccgccgagaaggggcagcgttttccgatgcactggctgtttcgggcactgtaagagcagacgggcacgctgtgctgcatctccacccccaggtgctcccggacaaagtccacggcagcctggacggccagccaggaatcccgtttgcagcaccgggggccacccaccttgccgatgctgtccagggcccgggcggtcatctgattgctcaatccccagggctcccgggccaggggcgtggatgccgtggcgatggccaggaactgccccgcgctgatccccgccccgcaggcgccccagaagccgcaggccccgccggggacagctttgccccggctgtacatctcccggagagcgctctccaggtccaacttgcccccggcatttttataggcggtgagcagcgccgctcccaccatcacatggtgctctggcccgtgcatatggcagaaggacaggtccatcatccggcggaggatagcggcggggtcggcggaagtctccgccaagcacaggccgaagatggtgtccatgccctgggtatggcagtcattgcaaacataatggccgttgacgcaccgggtcttgctggattcctttttatggcagatggcgcactccatgtcctcgtcccggaccagatattccagcggtgccttgcagatcaggcattcttctggatgcaaatcgatcactcctcccttatccgcagcgcaggaagtcacgcggctgcgcagtcccgacgccccccacaatatgctgtggggaaatgttctttctcataaatcggctccccccgatgcgttcatccacacatcagctgtgtactctctcctgttattttctatcatacaatagccaagataacccgctgaatgtaaaatccgcttaaggggagcaaacattttctccggctgtacatgcagtcattctatccgttcagcgttttccggaagcatagtcgcccatatggatgtccaccactcccctgggcggctggatcagggcatcctcgtactggcacttccactgaatctcccggctcatccggccattctctatgccgtcaatcgtttccccatccccaatggggttatcatgctccagtatgtacgacgccgcattataggcgtggttcactacccagttgggatccatgctatggaagtggtactggaggtccggcaggaacagggtgttcatgcccactgtgtcgatgagcatatcctcggtgccctcaatgttgaagaagcggacattgacaccaaatcggatgaagcggtccgagccctcgatctggtgggaacgcacatattccgccagcaagagcttgccgcagttctggaaatagaacgcctcacaggtggggtacagctctgccagggcctccacgaagtcggcgtccaggttggccctctccagggccggaagcgccgccgccagcatatcagtggccacgacctgataccggcactcccgaaagattcgctctcggtcctcccggcagtcccacatctggctcataaggaacgcatcgaagcccttgcccttgaatttgtcacatcccatcaccatcagctgcaccgggcatttgccgtcctgaaattccgcgatatgatccagggcagcaaagcctgccatctttttatcacggcagaaacactctaccgcgccgatgtgctttttcatcacagcggtcatctcatccttgtccggcatgtctaccggctctttgaacagcatttgaatgagataggggccgccgggctggggcccttttttgtcatccaggttttgccggaacacttgattactcatttttgtcctccttatagcagcagaccatgtaacaacgggcgatcgctactttgtatgcggggttactccaaaaatcaaaaaaagagccacactaaatagaaccaatccgatgaagttgcgctctatcagcagttttatggccaagagaagcagcagaccacaaaccagaataataataccattcatttctttttatccattttgtcagggaacagcttgaaccgaaacgccagttcctgattaacgatttccttgggcagctttcggggattggcgattagataccaagcccgataagtccgcttttccatgtcctgctcctgaaggtagatctgatagcccgcttcgtcctcctccgtccaagtgtcatactgcttcttggcctggacatggtttcccacgaccacgtccaattcctccacggagcggctggcggcccaagcatggtccacatcgccagcatgggagaaatagaagatttgcatccccatccaccggcgcaccttgctttccggcgttccacgcaattccgcctgacggcggtactccgccagctgctctggtgttccgtatctttccaccgcctgctcctccacatgaatacgccaactgtaatcctccggctgggtaaagggggcgcagaccggctgtaacgcctctgccgggtcctcctcaaagcggtcgataaagtcaaggtagcgggctttgattaagggcagaaaagtgtccagcaacccggtatccaaccgcaggtcctctgtcagcatccggaagaacgaaccgcctgttatcggttctattttgaaagagtagagaaagtcatccccctgcttaatgatgcagctgaatcccacctccacatttccatggccgatttcgtagtctatgtagttgtagcggctccgctcaaaccagatcaggtaggtcaggccgtttttcgttctcttttgaagttgccctttttcagacgcttccagcccttttcctccagccccagcccgttccacaggtagtccagaagctcctgaaatatatctgccgggcgtttttgttccataaaatcctcccaaccgcttatgcttgttcctcactttttccaatcacatccgctaattgagtactgacagtatctatgtagagatgcaccccatcccgatcacagtggtacaggtttgagtagcttgtactctcattagggcggatagggttaggctccaccacctcggtagcttccagcagaccgacacccagttccgccgcggcagtgagagcctttttcagcacggcaagctgtccgttactccaaagtccctccaaatcctccagcacctttgggtcctgctccagatcccggagaagctgtgtaacctgctttggagacaggtacacgccggaacagtagttttcaatgatctgattttctgccggatttggaaaagctgttggtgtcacctgtgcccatggggtgaaataccgggcatattccggcttttcttccaccaggaaagaaaaggcactgcctctggtgtaatagtaatcccggaaaaagccctggatcaccgcaatataaaagccgtggctcttatcaaacaattcatccggctctgtccccgcaccgacccgcagagtatccagatatttttccgcatagaagtcctccattccgtgctgtgcggcaagggccagcaccttttcctcctgcccctgctgtacccaggaaagcggggtaaaataccattcccgcatttcttccggcgaaatcgggtgaaaactgacatcgtatcccataaagctcctccttaataatccagtaaaatgggcacctgctgttcctcggcaaaccgcatggcccgccagaacatggagaaggcgaacttggcaagggactgggtatcatactgggtatgctccgagatgtccgccttgctgtactgtccatccgggcctacggttccgtctgccgggtatccctccgtgtctgcccaatcaaggatggtatcctcatcggcctgccacgccagctggttcagcttctccagctccttccgcagtccgcccaccgtgccgatggcggcggtgtcgtcggtaggcagaggtgcttggaagaagaaggcgtccggcagaggcagccaccaggtagccccacggaacagggaccatacccgctcctggtccgccgcaaggcgggcgaccaggggatgctccccgaagttccagtccttctccacagtgggaggcaccggttcctcgtatgtatggcaggcggccgccagcagcatggcgccgaaggcatcccaatccggcttgtcggtgtagtaggggctctcgttattctccggccagggagcgtagggggctggcccggctgagaaatggcgttcagaatctgatcccgccagttctccaccgccgcctggacctcggccggggacagttcctcctcgttgtcagcgggttccccgtccggggtgatgcggttgaaggcgtatccgttttcctccgcccactgctgaacaacggttttccagttgtgagaatagtaccgggtcaatgttccggcgtagatatcaagtcccattatgatgcctccttttttgtctgtacggtcattcttttgccggagcgaacagtcggtcaatcttctccagattgtattccaagatccagtcattgaattgatgatagagcggcagtagcagctcccgtgagccgcccagtatatccaacccacggtcatcgtacagatggtagaggaatggccccggcccggtcagatagacgctggacacaaagccgttccagccgccgatgtcccccagaatgatctcctggagaagccgctccggttgaaagctgattttgctgagatcccagtaaaactgtacttgtgcatatgtatccccgtcctcgtccatcatggtcgctgtgacctgctcatgcggggcaggaagtgcggccctctgctggatggccgtcagcagggactcgacaggtttttcttcgggatacccgtcaatccgcagaatacccggcggcgctggaaggttccggtagatcataatcgcccgctccagtgcgccttgaacataggcggggtttggagttagtttctcggtgttctcgtccgaataggtgcattccagatagactggttcatctccgccgatttcaaaccggatggcgaccggggcatgatggaacagcggatgttccagccacgccataccaagattatgtaagatggtgtcaaaatcctccgccagcattgcacacctccactatttccactcaaagggctcctttaagtggcatttctccataattttcttttccaaagcttcataggcatccatatcctctggctgcgctggaatacccttttcccaccaataaccgttcccatagtagaaaaacatggcccagtaataaggccggtcatggctgaatatcgccactcccacggcatcggccactggctctgccagcggtgcgcgttccactgtctgagaggcttcctcataggagatccccaccagctccaccagcaggtgcttcaccagttcgcagaagctatactggttgaagatgacctgaccattctcatctttgaacacaagtccatctctcaccatagtatttctctccgtttcttaacctgcatccttggcatgggcatagtcccgtcaagtcatctcatacagcagggcagcgtcgctctgcaccagctccagatgggagcgcagcgtttcaagtccgctttgcaccgcctcggtgggcagctcccagtctgcggcaatttcggcggccagctccgggaggctctgctcccgcagagttgccagcagttcagacgccagctctccctccagcagagcgcagtccagagtgttctccgtctggggagcgggaaatcggacatccagatccagctcgctctcacaccagtcccagatggccatgtagaccgcgccggagcagtcaccgttggacagctcctgccgctgaccgtctttgagcagataaaaggatgcgatctgtgacatggcagttcctcctgaatgttattctttctccatcagcccttcggcctgcatccggatcacatagaaagcccgtacccagtccagttcctgctccatggattcctccaaagccagcaggcggcgctttcccagcctgcggtccagaagggcgaggatgcggacaaggggattcttgctgacaaggcttttctcaatgctctggttgtcaaattcatgaaatgcctcatagaaaaaaccgttgtcaaaacagccatcgttcagtgtcccttcatgggccagccgaaaaggggccgttcgatcgtcctggccgatgccctcccgccgcagggcctgatatctgttccagtagttctgttcataggcatagtagttacttcgcagcacctccacgccgtccagtcgaatggctgcccggcctgtttggtcatggctttcccagtagctggcggcaaaatactggatgtgcccacggagcgtcgggcacaggtagtcattctccagcttgtttcggattccgctccaagttgacacaggtaccgcctcctttctgatgccactgcgggtaaggtggattcccaataaattgaaatttgaaaattacatataatcctcgatatatgatcgttctataaattcttttactgcaaatagatctgcaaactcctcatactggggaaatccgtccgcattatgtgctgagtaagttaaatggaacagatagtagatgtctcttcctgttccgtttctgagaacatataacacatcatcattggattcacacttcgcaaccgccaagatttttttgccgtataagaagtggtcttgtcctatttctttgtttagttctgcaacaaatgccccgtccgcctgtgcgaaggggatcatataccagttaaaatcgttaccatatttatcatagagatcacggaacatttcttctaatgtcattttcattcttccttcgctgatttacagttcagccatcaaccgccgcgctattttctttttataggcgatattttcattgctcattgagatacctcgccaatttcttctccagcagttctgtcatatcattgcagagtcgcttgaccttgtcctgctcatgggcgtagtaccagatggtttcctctccggggcggagcaggagctggtcgccatccgcttctttccagaactcgcccagcacacaataccgctctccatggatggttagatcaaacatcccggaaagtgaaaggatcacgcctgtggatacctggatgccagcggtcagcaggaagaactctcgcacctgggccgggagcgtgaagtccagcacgctttcttgacttgcgatctgctcctccgtggcggcaggctggatctcgtcagatggctccagcgcctttgccagcgccttggagaacttggggtaacggcaaaacagctcaggattgttggccttgaattccttttgctttttccgctgtactcgctcctgctccttgcagaaagcgtccagctccgccagataccgctcctggtagagattgctgacctcaaatgctgtgccgctcttttccagaatggcgatggctcccttttggctggtcagcaccgggacccatcggaagtcatgccggcaaggtttcagtttcaaaaattcgcctcggctcagcaggttttccagctccggctcatgctcgtcccaccagctccgccagctttcgggagtttcccgtccctcggccaggtccaggagttttattgccaatacttcactattcataggtcaattctccgtttcaaagggtgcaggaatcccgtcaatcccaccagaagtaccagacagtggactgccgcaggacatccgccagattgcccacggtgggatcatcctgctcctgatccacgatgtccgggcagaagccatattgctccacagccaactccacagctctttccttggggacaggaaccggaagttcaaactccatctcatcgtggctcatggcggcagggatggcgccgtactgctcaaaccagtattttgccactgccatcagttccggcgtgttggggcactcattccagttgccgaagggcaggtaggcgaagatctcccagggttttttcaccgggatcctggccaaaacgagggggtgggtcatgtggctgtccgaatcccagtagcaggagaaacggtcattgtcatagccgccagccatctcgcccagaatctcctcctcccagtccatatcgtcatcttcggcctctgctttgcgctggccgatcagttcctccagaaccgccttgctgtccttgatgggggcggagagcatcttcttccggtactccgttaccgctttgaggtcaaattcgtagcagtccgcgtcatgctccgggtcagcgttcatcaccagacactccagcagtgtttcgtcatccgccttgatgagcaccggtacaaatccctctttgacactttcccgtttggcatagctgtacgccgacatgatggggtcatcatctgccatggatgggaaataggtgcactcgcagtccagatactccatcaaagcatccgccacctcggagggctccagcgtgtcttcgtcaaagtcctgtccctgccagttttcaaagcgttccccgatcacctttgccatagcctgataataatcctcgtcaaagggaatgaacaggtaggcttcgtcccggaactcctcggagtgataccgctccgggccgaagaaacggagtgcgttatcgtcaacatcggcaggatagtaggggctgtcgccctctccgtagtaatagcctgcaaaggcacggccttgctgattgaacagcacagagaacagacagccgtccagctcatcccggataaactcccgcagatccacactggcaggatcaactttgacctgtttggccacttcgctgtattcttttaagaagtcctcgcccatcaggtcgtgttctatgcaccagcgcaggtagatggccatgtggttataggcattgatggggtcaataggcagttccttttcctcaatgctctcaaggtgataggaagcgtcatccatctcaccgtcaaaatcatcattggaaagggtgccacgagtgacagcatcctgacgggtgggatttacgacaaaactgatccccctcatcctgttcagcagagcgtcagcgtcatgttccagtttatagtccaattcatccgcataaagaggaatgacctgatagaagttgacctcctcgccgcccggcagagtgcagacctcactgccgtcctccgtaccctggggatcgatcagggtagcagtgcacagtttcgtgttttccgcaaagggttcccggttctccactgtatgaccatgccccaaccagctgtcacagttgatgggcagacgggccagggacttcagcaggcggatgggccagtaccaccgctcatctttcatggactcctgatccagcttccaatccgcaggcagtgcaatggccaactccgcccgctccagcttgtattccgccagttcctccggaacattcatccggtgggcgcccatgcccatagtgaccagcgtgtagtagtcccgctcccgggagggcggtaccacgcagatgtccacatggatgtccggggagaccagctcatggaacacattctcgaacgggccgaaatactgctggatgtgcccctcgacggcttccatctcctcctcggtgtagacctccggttcactggatttctcgtcttgaaagcattcctcgtccgggcagtcatccccgccgccattcgggtcttcaccgcctccctccggtccatccccgccggattcccaggagattttcagtgtcatctgctccttcggcagagagacaccgggactacggatgatggcatgcttatcgtccgcagaaaagccgatagtctccccatccttcagcgtaacatcacacgccagcacataggaggcaaggcttgccaaaaagtcccgcagcttctccggctcggcgtcagcgttcagcacctccatctcctccttgccgaacacatccatgccgtaggtatagccgttcaagccgccctcgctccggtacaggccgaaccagatccagttgaagatgggcagttcgtcctctttcatcatatcagcaaagccctcgtagaagcggggctcaaacaccacgccgctggtgtagataccggtggcgtattgttggcggcagcaggcagccgccagcttggcgaagagcttgcccttctccagaacctttttctccttgcccagcaccgccaccatgatatgggcgcggtgctcccgtgcgacttggacggcatcctcccacatgtagttgttctctgcgtttatttccgcttcgccgtcggggatgggataggtcgccagactgacagcagcgagcatatcacccacctcgaacaccagcgcatcgtcatccttctcctcactggcgtcgtactcctccacagagatgtcccatttttccttcatgtcccggatgaactggtccttgtcccattctcccttggacaggagaacaaagccggtgaagacacctgtgcggtcggtttcctccccgtcagcatcatcctcctcgaaatcgccctcattttcatccggatcgtagagggcttcatgctccagtccacggacaaattcctcaaagctgtctgccagatgggtgatcttgtagtcgttttcctgatccacatggactaccgcaggctctccctgggggccgcaagcccggtagtccagaaagatcatatcatgtccggcgctgggacagtcacagatggccacgccgatggcaggatacgcccactcgtcgatcatgaactggctgcccagctttccgcagagggagcagcttttttcccgtccgatgccgaacataccggtgatggccacatggtcctctgcccagcaggtgggctcatcgcagggatagcaggtgttcaccggaatgccgccgttgtgctgcttcatcagccagatgtaggaggcgggaagtttgtagcccagttcctcctccacgctggcgatcagctcatcggaaggcggatcactgacgtactctttcagcgcatacatactgtcgtcccagaaattggtgaggtcgaagccctcaaagggggtatcacccggcacgaatttgtccttcttgttccggctgctccggcgtttccggatctccgccttgcactcccggatcaccaccggagcgtcctcgtcctccgggtccagctccgcccaccgccgggcataggggatggcctcttcctcctgaccgtggagatactgatatccgtaggccatccgcatattccactccgccttgtcccggccttcctcccggacggactccagcacctcgatggctcgaagcagagccttgtcccccttgtagttgggggttccctcattgtggtcgcccagaattgcgtagttctccagcgcccgggccagggcgtaggcggtgcggtagttccgccagtcctccgggatggcattcaatgcctgaatacagcgggtgtactcgtcctcgtcgttccactgctggagctgtgcaaagaatgcctctgcattctgcggggtataagggatatagtccatgcccgtcggcgtctcgtccaactcggcggcctgcgcctcaccgtccggctcctcatcgggcggatttttcagactcacagtgcccgcttcacggcggaaggtatggaagctggcccaggggatgtcgctgtccttgaagaattcctttgccatctggagtgccgcccggatgtcccaggcgatgaagtccacatagccgcagtagagtccggtggctccgccggtgagggtgaccacctccgggccgtccccggtggtgaacacttcttccagtttgtcccggaagtcaaaaatcttctccgttccttcctcctcccgcagggtatccaggggatagcagaagaagcccgccgctgcgccgtcggcatggagctcgtccataaagtcattgtcggcattcagatagccgttgatgagcggcacacagttggtggagccagccatcacatccagccgccagtcggcgtccgggtccttgttgggttccattttgtagccaaggtagctctccagataggcttccggatcggtggaaagttccaagccccgctccttcaacgcgtcaggaagctgggacataagaatggacggctctgccttgggctcctccagcacatcgaagctgtctatgtatctcatgtggggatctcgcccagcacctggtcggtgagggtggtgagcatccaccagacccggccttcctcctcccggagcatgggcagcagcttttcgcagtaggcggagatggcgaagctgttttcgccctgttcctccagccagatctgcacatcttccccggagatatcccagccgtcgtcggtccgcaggccgatgttttggctgggctggcggcccaccaggatgttccagtgctccagcacctccttgggggcgtgcttccggaagtagaccagctcaaacagcttgacctcgtcgccctccggggtgaggatcagctcatgcttttcgccattgaagcccatctcgaaggaaatctcgtcaaagaccaagttcaaagtatcttccatttgggccacgatctccgcgccgcgggtgtgatccttgtcgtcgtccatcatctggcgcagctgggcttccatttcggcaaaggtttcccaccagtccactgtccgctcccggaagcactgtgaaaactgaggcagagaaatgctcttcttgcaccagtcgatcagctctatggtgtcctcgtcaccagggcgagcctccaatgccttttcaaagtatcgcagagcccggccctcctgatccagataaaagtaagagtaacccatgcggaagttccagcagtggtctccctcgaagtattccccatgggggctcaagagagcgatggcctttttgagcagcgcacggttggaaggtgcccccagattgttgtaggcccgggccagctcgctgtccatctccggggtgcgctcctgggctggaatggtctccagcgcgtcaatgatcttctggtactcgctcttttcattccacttctggcactgccttaaaatgtccatatctgggtcctcctcgtcctcatccgttttccagtctttgatctgctggaacacgccattctcatcccgctcaaaggcgcagggggcgggcgtatgtagcaggggaataatgtcgggatcgtcgttgcagatggagttgaggccgtagatcccggcgttgttggggtcgtccatgtactcgtcgctctcatcaccggcggtaaagcgccagccgctgtcccagtcgccgtccggctcctcccggtagcagtagccaaccttgcagccctccaccgtaatgcggctcgtggcgatgcagccattggcttcctcccagtctgggagcagattctgcatgtcctctgcctttacatagtagtcccggttgcgaccggcggcctcatacagctccttccgcagcgcctctatatcccgagccatctcccggatctcctcgtcatccatcatttcgtggagatcataggacagaggattttgggcaaaatccgccagggccttgttcattgcgtcatgctcctctggcgtggcggtgatgcggatacggcggtggggggtgttatactcgtccaggtcgtggaggtccacgccgccgctgacgctgcactccagcaggatggcggccagatcggtgaccacatcaatggcgaagtggaagtccatctccacgccattggagtgggtgaattccagataccccacagtctggcggaagttccagttctgcttgtccagcccgatcttagcgaagatctcgctgaggggcatctcctctttcttctggtcttctaaaaaggccacaaggttcaggctgtcatcggaacctccgataaagttgccccagtattttttgatatacatttgtcacgcctcctgttattccggccactcatcgccgtcacaccggctgatgaagtcatagtgcaggctctcaaagtaatcgttgggaatggattccccgtcctgacgaagctccagcccatccagatccatcatctcattgatatatgccagggtatcgtggatacccgcgatatgctcgtcctggagcatatcggccagcacacctttctgctccggggtcagtgtggcgagaagctcgtttttcgccttgttgtcctctgtcttgggaaaaccatcgcccttgacccaaagggcggtcatgctgtctttccgctccacaaggccgtcaataaatgcttgatacagttcaagttccttactcatagcagatcctccattctcaagcaaaaaattggctctcccagatggcctcaaattccgctttctctatggcgcaggcgcggaactcctcgccccagatatgggcgttcaattcctccacggttgggatcggcgtgatctcgatagcgccttcataaaggtcagggatattacgggtgcgtccatctgcaaagatgtcgatggagcggaggaccagccgctcattttcggtatccacttcatagaggatgaccggtggttctccctctggtgcgctctcccaaaagagcttgatgtactcgatcattccattatcctcatttgaaccaatgccaccccgtcatggtgccggttacctcatctatctgtattgcaatatcatcattgccgcgacagcccagcaaggccgcgagatgatcgttttccagaatcaaatcataaaactcaaccgctataccttggaattcctttggaatcttcagcgcagaaaaggaatccgctgactgagcattttggaaaaattcaatggccgttttcctgcattttactatgattcctgtttgagtggtcaactctttcatgttttctctgcctcgctcatgttcagatacatccccatcgttttttcatcggcacaggccgcccggatcagtttggccagcatcatcaaatcgtcgatgtattgggagtacacgcagaacacatcctcgtcggagtcgaagtgaaacagatccctgccgctgttgtttttctcgaactcccggatcacgccccggaccagccgctcccagtctttgctgctgccagtccgtcccagccggcagaattcctccacctggaacccgtcgctgatcttcagcaggagggagatcgcataagggtggtggggaatgagaaaaaagggcgcgatctgatccggtttgacccagatcttgaagggcgggcgcgggtcggggatccagggcaggatctcccattcctcctcccgccgatttccgtattgaaaaaggtccttcacggcttcacctcctgttccagcttttttctgcatttctcaatgtgggcccgcttggcggccagaatctcccgcaccgtctccgcctccatccgcagcagtagggcaattttctccgggggcatcccgtccgccgccagcatacagagaatctccttctgcgcggaggctttgccggccgcgaagccggtatcatagtcgtaagacagcagggcaaggaattgctccggcgtcagagtggaaattagtccctgctctccgtggcagatcctgctacgaagtgattgtacttcttcctgggatagtttagacatggactccccccctttccagcatatcaggaaccaatctgtcccgcatttaccgggcggaagatcctgcggcccgccagcagctcctccagctttttggccaacgcctccacaatggcgtggcagggattctcaccccccacgatctccagcttttgcagctcgacacagtggagcgttccatagatgcccagcgtgaagtctgtcaagtcagcaatcatttggtagccctccatgttgctcacatcggtctggccctctttggcggtcatcagcccaatgatccccaccgccacagtgaaagcaccgcagcaggactgctcggtctgcatgcccaagcccatgacagagaacatcttccgggtctcctcggacaaattcagatggtaatactcattgcaggccatgaacacggcctcggcgcaggtcagttccgtgccgatgtggtagtggttgaccagttcatagagtttcattgttgccataccatactccaatcgcaaagcatttcattctgtgtcactctgcgcagctcgtcccgcacctccatcagcgcaaagcccagcaggttttgtccgcgccacttcatcgggtcctgggcctccggcgaactggccgcgaggcggatgccccagatggcatcgtaggggctggcctccaccagcacgctgtccccggtggaaaggagaaactcccgcagttcgcggttctggctgaatttgtgccagttgccaagtagcacaatggcgtacttgaacttgtcccataccttctgctcaaagccccgcaccttgcggcccagggccttgatctgcttttggtcgctgcatttcaaaatctggtcccggatctctttgtcgccgaacagctcggccttggcagccatcatgtattgctccatgcagaggtagggggcagccgtcgtatagaagtcctccatccaccactggctgaggtagctttttgtcagctggccgtcctgggaaggctgatggccccagaacaggcacagttcccgctttcgcccggcggtaaactcctgctggagccactggcgggtgtactttggccggccttccggctgccacgcctccaccaggaagtcaccgtgtaccagcacttcgccgctgtcctcgtcctcccaccagcccttccaggttaccggctcgggaaagagggcgcggtattccgtccgctcctccggggagagggtgtccagccaatcgccaaatcggtatatgtaatcctcccatagcccatgcgccagccaatggagtatcgctcgatctccgggaaggccatccaagggggaggcatgattttcttatcttgtagtgccatagggttgtcctttcctgttagaaactgtcgaagttcttctctcacatccagcggagcgccgtccagggatgtgatctgtgccaactctgtttccgtcagatttttcaggaaaatgcagtattcatctgggtggcccccacaagctccattttaggcatctcgatctgctgtgggtcggtgatccgcagacaaggctcttccgttgcccaaaaccgggtcagagtaaaaacttggccgttgaaaataactttctgttccatcctcatccctcctgtaacttcttcagcagcttcacgatccgctcccgattctttgcggttttcatgaaggcggggagatgatcggcctgagtctttttcgctcttcccagcggcttttcccgcaggtcggcgctgagatagtcgatcagataggcaaggtgctcccggttgagtgcccaggccggtttgccctggaaggaggtcaaaaaccacagttccaggccgaaataaggttctcgtccgtcctgaatctcagcagtgtaggaaaatgcttcagctgttttatgaacttctcccgacatggttgtcccacaatagggacaggccacatggagaacagaaaagtgctgcttttcctcatcttcaatatccacccgatagtatcttccgcagtttttgcactggttatggacatcgtagcggtagatcgtccggtcacgggtctcctgatggccgcagctcaggcaccggaaataggcgttgtcatcatccgctgtcaccatacctgcgccgtggcacttggggcatttcacctgaatgccggaggtcagggcgttgtatgcactgtatgtaaagtagggttcatcaacaattcggctcatgcgcccgcacattcctttctatctaaggcccggcggacagcgttttcttcatgtctgccaagcctttttcatctaacccgtatgcctgctcaatcaaagtcccataccgatccgcatactgcgagaactctgcttcacagtgcaaatcatacagcaacaggcagccgttgtggaatacaacagggtcgggctccgcttttccttcctcctctgctaccagacgaagcacctcatcggcaatggcaagccgctctgatctgcctttgagctttgataatgccattcgtacaaaggcggcaatcacctcctgttcctgtagggcaatcgcggtcagttctttctgaaccaagaggagggctttttcatcccacatctcggcgctgcgtagaagatccgccaccagcgttcttctgttgagatcccgattttcccaggaaccaagctccagtagcagatctctttgctttacctgatccggttcgcggctccaatcaaacagccttgcccgaaaaatctggtaggctgacatcagttccaaccacgccgggctgtgatccttgccgaactctatcatgcttctcattttcctcaaaaatcccgcagctgctcaaacttctcaatcagggcatctttttggagtgtgttgtccggcagtgcgtccagaatcccccgcagggccatgtaaatttcatcccgctcctcggtttcgataaagcccatcttgttgaaggtctgggtgtatgctgcaaccgcatccagcgcctgggcctgggcgtcctcgcccggctcagcggccagtttcatcaattgggagcgggtcttgcggtattgattggctgcctttctcgcggcactgacaggaatatgctccgcaccgtcccagccccggaagggattgcccaggttttgcgccagccactccggtttccggggcttggtgatccgcaggtccattcccgccttacctttccagagctgctttgccgcttttgctgccgtctccggcaggctggtcatccagaaccagcgaagctccggcatctgctccggggtggggatgtcgtccgccccgaagccgaacaggtcgaaggtggaaaggtgcgtcagctcccggaactctcgcacagcagagaagttttgcagatttcccggcgcgccccagagcctcagctccttcaggtggggatggacagcagccagtccgctcagatcaaaatctttcagctggatgccatgcagttccaataggttcggcagttccgtgtgcgggcggtattccccgataaattggagggtcagaccgctgccatcttcgggggcatggatggtacaggcgtccggccccttgttctggaacaggagctgctctgtatcctcactcagccacagttcctgaaggcctgtcatgtccaacatcagctttctgatgctggtgccccgcagatcaagtgtcctctgaccgtggtccagcaaagtcagttcatcaacgaagggggttccccgcaaaaactccagcagatccgggtgccaccgctggcagatgaggtcggagaggcagggcagcgcctttagttccagcgccgaatcgaatggctcgtgctggtccatgatccgatggctgctgaccttcaccgggataccgccgatctctgtcaccccgtcgctctccgtggcctccttgaaggcccgccgccgcttttccgggatggcttgccaccggatctggaggtacacatcataaccgtcattccagccgccgtaggagcggcagggctggtcggtgaagggcggcagggtacccaccagcgtgtactggggcgggacctccaccggcacccgcagcagatgaaggtcacgggaccagtacatgaaatctatgtagagcgggcggagatgaggcagttcctccgcagtcagaggggcgtcacctgcccagtccagagagaggatcactgcccaggactccctgctcaccgtgtccggcggcgcgatataggccacctggcaggcggtgtagcatttcaagtatcgattgtagactgtatagacccctccggcttgtgctttcatacctgtgcctccccctgatagcttatagtcctattctctgccagccgtccagtcgctcctgcaccccgtcgatcctccagccctcgcccacacgcttcatgaggaagcggcggacaaagccggtgtttttctctctggtgtagatgtagagcttgtttcgggtgatctgctccgcgtccaggaactgctctcccttgtaggtgccctgggcgctgtacgagaggcccaggggtcggaagcccatacggggcttttcgctcacatacttctcccagatcaccagcaggcggggcacagcctcagcatcttcaaacccggcctgttccatgtactgctcccattctgtcatttcagcaaagaaggcagacaacaccctgcggcattccaccgccgcctgttcgtccagctggacgggctttttgcccttttcccgctggatttgagagaagtattccatctgctccttggtgaactgcacatgggccaccggctcgatgcggttgttgccggcgatggccagcagaccctcgtatgtaacggcggtatggtcgatctggatgtgggagagcttgggaatggaggccgcctggagcaaaccggcgtcgtccaacccggtgcggttgagggtgagaaggtccagcttgcagctttgcagggcggacagaccgctgccgtggatggcggcgttgccgtccaacagcagatagcgcagcttgggcatagcgaaaaaaacggggaaacaggcgtcagtgagtgcgccgtcttccacgccgaagttgaccatgcttttgtgttcggcgaagggggcaagcagttcatccgtcaccggatagcctttcacatggaagcctaccagggtgtaaccagccagccgttccatgagggccaaggtcagctccgggatctcaaacttcttctctccatccagggtcaggacaccgttttcccagtccgctgtccgcgcccgtttcggccattccatagctgcttacccccttacgcctgttcctggtagctggcttcaatgtcgatgaagcgcacgtacacggcgcagacttctccctttgcgtcatagccgaagtagacgggatagtagccgtcaccccagccggaagcgaagataggcagattgcagtccgtgtccggcaccgtccagttgagccagtcgccgtggctcaactgatatttgggacaggctttggcgttttcctccagcaagtcacagaacaggtcgttgtacggatcaatgtccgggtcttcctccagccgcttggcccagtatgttttgaaggccgcctgggtctggatgtccgcaacacagcccatcccggcgtctacgccaaagccaaaataaccgtcctcatccagttcctcgtccagatcctctttgcccgtcatccccaactcatagcggacaggcttttcccggctgacctccaccttgacgcaggcgtagcggtcgccgtatttttcactgggcaccacgcagatcttcacgggataagttccggcagggatcgtctgtataaagggcggtgtatcctccagctccaccagcggatcgcaggcaaagatcgttccgctgggaaaatggacggcgccgatgtccagcacatccacttccctattcccaatcactttctctgtgaaatgagcgtccaggtctgttttgcaggccagtttgtctttgatggattcatatttgttcagccattgtgttgcaggcatttcgatttctcctttcttttccagcggtatccggacgatgggccggtaaaagtcatagttgccgttcagtgcattatcctcctgcacttccggcttgcagtggggcgagcagggcaggaaaccaaggaacggtcccagcccgccgcagatattgcacccgccgtcgccgccgcaggtggtgagcctgtcagcctgtaccacttcccgcatatagggatcgtaggcgatggacaggccgaagaagttgggttcctccatgtcatagggccggttctcatcctcatccatgtcctcaaaccagtgcagacgcatggagtagtctaacccatctccccatggaaacagggtccgacatccgccgccacacaggtaggcccactcgtccgccgtgggcagggagaaaccctgtttttgcagccggttttgaaagtccggatagtctacctcgtgatagaggcttgcctgccagctgtcgccatcccgctcgaaacgggcacggcctaccagagtaagactgttcctgtcagtcaaagcgaattggcgaaaatcttccaaccattccgggcgcagccgtgggtcatccagcttgaccggctcccagttgatctcctccagctcccggcccaccagcatggggccgatggccgcccgccggacaggggccatgctctctccaatgagttctgtcgggtctcgctccatttcccattcccggaacaggtactccaattcctcgcggctttcctgattcagtcctgcggcaaactgttcccagcccagtatgacggtatcgccggggacaaagacgaactcccggccatcttttttgaagattccggtggtgcagtgctgtccccagcggccaaagtgctccatccgcacaaaatccaggcgatactgtgctgccagccgctccattatgggccgcttttcctccggggagagtcggtcaaactgagggcgaagcaggaggctttcggtatcggaaatgctgtttgcgccatccttcggcggctctggttcttcgcccgcaagaaagatgggcagattcgggtacacttctttgtactctcgccaaggttctagctttttgggcttgtttgccgtccgaagaaaaccccagaagtcgatgggataacgaaacaccggcccgaccctatcccgccgggtgacgatgaccactgtgccatcggtgagtattccaatgtgctgcattttctccccgccgaacattcccggacggatacgcagcacttcacgggtgttcatgttgatgagctgggcaaagtcatcggagaggatttcgccgtttccctgcaccagcaaccagtccccggtaaaccagcgaagtttcagctcctcgcccaggccgggcagaggggcgatgcgacaccgcccggtgtccatgtccagttccagcaggcattcttccatccgccacttgccactgacagagtgtatcatatagatacagttggtgccgggaacgggaacggcctcggagagatggtcgtatccatccagagagaaggtgtgttttgttaccttgccgttttcccagcggtagatctgtcccttgtaccactcgttggaaaagtagacccggcccagcccgtctgtcacgatgccacaatggtatttggtgctccatccatcttccggcaggggccagtttttcacatcctgacaggtgccccggtcggtgagttcaatccgtgtggcattggtgggatcgcccacccagagggagtttcccacccaccggagagaatggggcgccccctcgtatccgatgggagaaggctcaaaaaaattaagtgtactggggtttttgccaagcaacacctttccgatctgcccgcttgcagaggctccggaggcggcatacactccggcttgatccgaataggcgaggtgcccgaactggtacaggctcttggagcgggtcacttttggcgggcggcagcgcagatctgccacacagccgtatttccattcctccgaatggctgcttttccattctcccgctgcaaagtctcctgccagagagttgaagaaataatcgtactcatcttggagtatgtattcctcgcaaggcatcagcttcccagggtcctgctccttggcatggtcgccccattttcgtccttgctgtttcatcaggtgacaatattgcccctgctttttgcagtagcgttcccatccgctgcgttcttccgctggaattaggacaaacagatactcgtcctcctcgtccaggtcatacagcgcccagccgaaagtggacagctcctgtcccagcgcagccacgcccatttcgtggggtaatttcatatactgaatgccgagcgtatcaaagcgttcctccagcagcgccgggatctgcccgctccatttccgccgaagctccgccagcgtgtcctgtacggctccgtcaaatttcagaatgtccagcgcatcggatataatttgtgcccagtctgacataatagagtctcctatttcgagcgattcaaagttttccatccagtgcctccacaggtttcatggcagcggaatccaatttgcactgccgcagttcccgctcaatcagggcaaacacatccggaaagcactcaatctcatcctgatattcatatttcgcatacagtttcccgcactcggaaatccaaacctctgccgggtagtagtagccgatatgaccgatgggctgacatttttcaccggccgcctgttcgatctctgccagttcacagccggacatatcccgaaaataggcttcttccaaatggtttttgattccgttgaccaagtaaggaaacaaagcgaattgaaaatcagccgcccagttcagttttctctgctccaggtaccactcacagcacaggccgaaatatttacggtaaaaccgctgggttgtcttcatcatcgggacgccgtggtcggcgtaatactgctccgcaatggagatgtccacttttcgcccttcctgccatccggcgtactccatcagctgcttgaccttgcttttgaggtcgccggagatggggatgcgttctttaatcattcgaatcatctcctgtctgctgccaatcaaagatcctttggatatccgatcttatccaagcccgccttgatttcctccctctcgctgcgcgtagggttcaacgcagcggccagttcttttgtcaccggcaccccgtcagcaagctggcgcacagcttccaaaggcaggtcggcgtgataaaaccactttccgtactccacataggtctgtggattgccatcaatcgtggagagcagatctttggatgcgtcctcgccgtctatggggttgcagtgccaggtggagccatcctccgtccagacgcagaaggtgctcttcatctttttgacctctcggctgcccatgagtttttgcaaagcagagggcatcccatctgtcaggtcttcgacacggggaagtttttcctcccagtcatagagttcggaatccacaccgttgattacacagccttccggcgcaaacatgacgatcatgctccggtcactgccatcagtggcaaaaaacgcctctttgccctttcgccatgcggggttgtaggtatagtggcggatgaagctccattcctcctccagcatgatgatgtccagagccgccagtcctttgcagaagtttttcagacgctccgcattgggcaggccggataaatcttttgtggaaatcatgtggctatcctcctgtctttcgtcaccacagccgggcgatccgggtatatatcttattaggctctctgtccgtaaaactggtcaatgagtcggtgggttccgtaagcggcatcacattcaaaatgtccagcacataataccagattcctgtatcccagtcccggaaccgcccattgcagacagctctcccatactcaccgggagccaaatccaatgccagctcattgatgggctgtttttgcccggtctcatcgtaggtatatcgctccggcattgcaccgatgtgccaatcattgcggtaacgcacatggagtccggactccttctgaatcagttcaaaaggatgaattcgcattgagccattcggcttccattcgatcagcctgcgacagtccttatcgatctgaaatccattgggcctctgtaagatcgatacaaagtgtgtaggcaggccaaaggaataatacgagaagaagtctttcggcagccgcatggctctgggatactggttccgctgtgcggccgcatttccgccccggcagtctttataccattgcaggcggagctgctgaaccagaagtatgggcagatgctccaactgatgcttattctgtttcatcaccataccttcttccttgatagatccttccaatggtcttccatgtttcaggcatttacaactctgctgcaaactcataagaaaccgcaatgatgttgtaaacatcatcgtatgtaaacagccggtagtgccgatagatgtctttatcaaagtcctcccgcaccggcagagacttcagccaagtgctatcctcaatcaaatcgaaagaactgccatccagatgccccatcccagccagattttcataggtgtccaattcgcaggcaaaataggccagcacccgccggaaggtgagtgtgtagggaaaccagtctttttcgtccctgtgctgggagatcagatggccattgatgtcccccgtaaaggtcagattgttcagagcatcctgtttcacctggtccagatagatacagtcccgtcccatcaaaacacctaagcaagtgttaacagcagtcgctttttccataggtaactctctcctcagctctcgtgggtgatacagaaaatctcctggttcaagtcaaagtagaccaccatcagctcgtcggtgatctctgggttgaaggacaggtccagaatgaaaacttgctgattcatctcgctatccaccaggctgccgaaccgcttgagccgcaaaaagtccgccatctcggcaaaggacagcttggccgggtcggttcctggaaaaagttccgccgcaatatccgggcctacatcgtcccggtggaactccatgaaaaataccacggcatcgtggtaggggctgccctcgtccgccagcgccgctttgatggcagctttggccttttccgccaatctctccgcctcatccagcatttctcctaccgcatccatggcagcagaatcagcggtcagttctccctccacatcgaagagaaagggcagccccgattcctcgggaaagttgaatatctcctcgccgggtgtatatgtaaaatcaatgcgtttacagttcagcttcacagggatgcctcctcattggttttccagatggggtaatagaattggcgaatagactactgtatctccatcatgatccatcttgagaatgacagcaaattccgccacattgctctcctgtccctttgggagaggaaagatcattggggggcaacgcagggcagcatggttcgtggttttattccagtcctccatggccgcagataaaatggcgtcaatgtgtgccaataccttctcaatagaacccgctgatatgttgtaaaaagcggggtttttatgatactgctctgtgatgaagtttttataggtttggactggcataaagcaaaattcccaatcaaggggatacaacccaagccaatactcatacagtttcataggcgcctccttacccctcaatgttggcagctttgaggccctttttcaaggagccgtagaccgtcaccgcatggtcggtgaacatctcgtcgcagtcaaaccagacggtgaagctgccgccggaggtgacggacaggctcgtcatgctgatccgccgggcaagttcttcctctgtgatggggtctgttcccgggtcacgggggttttcctcatcctgggagagccagtcgttggccagcccggtcaggttctttgccgcaagctcccgcatggccttgtcccaggtctcgcagtcggccagcagcttcttggcggcactgcgggcacgggtccaggagggcttgctctccgcattgacctccagagacaggtacacatccgttccgcaccactggatctcaccctcaaaggtgttatagtccttgtccagcgtcagctcccccagcgtctcatcctggagcaccaccggcctgtggtactcgtccagaacggcctgaagctccgggcagtcctcgtgggccttgaccacctgggcgatacaccagggccacgccaccagatcctttgcccattcttccttcattcggcggatcttcaggcggcagatctgctccttgccaaagcgtccccagcccttttcgctgttacgctcctcgtcggtgaccggccaatccagccgctcctctttggtgctgaccttgccggtgtcacagaacaccatgcccagcgtcacaacagtcatttcccaaaagttgcccctgttgttatatccgcccccaatgcagcgattaatcagagcgaccacttcctgctcctcgggctcgtacatctcatagaattcttcaaacatcggcgtgacctcctttacagcagttccagcaccgcggcggcgggcttggcaaactctgccgggacttgctccaatatatcccggtaggcttccaccgactgccaggagtcataatagaagctgtaaaattcgtctgcggggaaaacctcgtcctcctcgtagcgcatctcatccgcttccccgtcgtattcttccgaccacagatattcttcccggagcagatcggagaactgcggcagcggctcggcgtgctccatctcatccccatcgcgaaagcactggaggatgccggcaaagaagtccagcagttccccggccaggaaatgggccacaggattccggccgctctctttgagtgctttgcccagaatccggctcaggaacaccatgccgaaaggcgtggcgtgccaaagggtcccctggtgctccatgttggtggtgagctcatagagagactctttgacggacgccaaatcacgcatctgctccagcaccgccagatgcgcgggaaaatccgtcccccggccataggcggtggtgagccggtgccacgggacatccgtgaccttgagatgggtgatgtaggtcctgttttcctctgtcatgttgccgccctccttactctgttgtctggctgcggtactccttctccagcgcggtgtaccaccgtttcagcatggtttgcagaccggttttccctttacgatctgtaaaaacgagaaacttctgcatcagtctggggaatagatatttgcccgcctctgtcagatcctgattgagatagaccatccgcaggatacggccctgtcgatccagagggttctttttcagcagttccttttcaaagcagaagcgcaggaatactgcattctcgtcgtagaagtcctccaccacagccgcgccaatgctggtatatgtgatgtcgtacaccaaccggctccagtcaaatttctcggcatagagcagtttcagtgcctttgcccagtgctcctccggaatcaccagcatcctgtgctgggcggtgctggagtagccacggtagacgggttccggctgtcccagcagttcactcacactgtcggcgtagacgaagcacagctcctcatcgaacaggccaccgatgaagttgccattgcagtacagcatataattcttggacttggctggagaataagagaggctatattcctgcgagaccaggcttttatgtaccttgttcagaaagtctattgatgtcatggctttactcctcaaactcgccctcaatcatcccgttcagataccggccgggatctgcgatgaagtcatcccatttggccagagggtggaattcctcatgctcgatatccagataccacagctttttgtccctggggctccacagcagcagatagtcgctgtaattgtccatggccgccatcagggagagcagcttcttccgcttccaggtcatctcctgcacatccatgaaagagtagagctctgcccacttcacccatttctgctccgggaactccagccgcagggggccggtcttcaagtattccaccagccgggcaggcagcttatagggcatgagctgccggagcttttcctgctcgttgtgccattcctccggttccagggctttcaggtagtcggccagctcctgattcttgttctgcaccgccacggtgtaaggccggtcgccgtatttgtcagcaatggtgatgtcggctccttgctcaatgagccagcgcaccatgggaagatttttgtgtcggacagcttcggtgacagcggtggaggcgttcggaaacaccatgtccggcttgtggtaattgatgtctgcccctttttccagaagcagccgggcaagtttggtattgccctcggacacagcggcccggaatgcctcgccgccaaacttgtccactgtgatcccggcttgctccagcaccgggatattctccgggcgcttgccccagcgcacttcctggaaggcccgctctttctgcttgggggtaagctgcgcggtctgtcccacaaagagtttcaccacctccggcccacaacagcgggcggcggtgagcagtaggggctgttcctctgccagactggaatcagccccatgctccagcaggaagtggatcataggcacatcattccgaaaaaccgcgatctccaatggcatcagcttgatgtattcgctgagctggatgggaacatctaaatccaggccaccttgaagcagcgcctccagcttgggagtgtcatggtcacagatggcggcagccgtttccgggagagtctcccagcggccaagataggcaatttcgtacatagggcacctactttctctatcctacaatggtggtttcctttacggccagattgtcataatccatagcaatcagtttttcggcggcctccggggtacacatgaaccaggtgctcacgccccaggcgtccatccttgtgacggtgaagaaatgggtttgggcagaagcaggttctcttgcgtcaatatagtagtcggagtagagatacaccagatcgacctctcgctccggcagccacttggcccggcgcacacgtggtttgccgtttttcagcgtcttctctctggggttctcaaaccacgccagttccttgagcttcagaccagtgaaggtatctatgagccgctgggcaatctcccggtgggtaaacaccccgcagttccaggagcccaccagccaggtctggataaagtctcccaccttgctgccgggggcgggcggcccgtagacgctctcgtccgcccacatgacctccagcttttcacattgatccggccggggacaggatttcttatcaccatagcggtacatgatattcacatagccgaagtcccggccggtccggtcatggccgacggcttccacttgataggcagttatggacatttcagctccacctcctgtgccagtacaaatccgcacagcccaagggaagcgtcgatgacaaatacccggatgtgctcccgatccatgcgctcccgcagttcctcgatgctgcaacaggcgggaaagccgtaagagacggccccgcccagcaggtctttgtactgttcaaaaaagccgtccacggtgatctcatccatgccgaagaggatgttgtcccggatcacattctcaaaccagtgggccagcaggccggtgaagtgaacggatacgttctctccggcctcagtccgggtatccacatgcaggatatgggcttcaaagtcagcgcaatagcacaggaccctgttgtcgtgcagatggtcaaaggattgaatcaccatactcatgccagctctgcgtccaaaatctggacttgcttcccttcctcgttcacatagtaaagggcgatataatcaatgccgtcccgcctgacctgctcccaaggcatccgctcaccgttgatcagttccacggtatccgccccatccggttcgaagtcctctttttcgtcctcatagtcaacgctgtaacccagctccaccaccagcttggaggcagggatcccataccgcttgaggggacggtgctccagcttggatggatcgtgtacatcgcagaacagattgtcgtagccatgccgcccaccgtcaaagatgacgaactcctcgccgctctccggatcacgggctgccaccagtccggggacctcatccccatctacgatataggattggggctctcccttcaccgtgagcagatctccgcaataccaaacctccagcagttccttgccggtggaggaacagagtgtcacggtgggcagacgcttctccgtccactctttcacatggccttccagccaggtgggatatttttcaggcatcatagccgttctcctcctatttcaatttcagcacaaatccccagatactcaccacgatcaggaggacacccaacaaaaagaaaaccacccgccggtatcccctgccgtggcggtgggcatcccgcgtaccggtggggtcgcagagccagttccagttgcggatcgctccgatcaaaatcactgcaccgatgattaccgaggcaatataccaatgctcctgtaaaaaagccgtaatctgcccgctgttcatttacatataaccctctttccatcatcgggagtttcccgccggataatctcctcccgctctttctgatctatctccaaggctttttcctcctccagatattcctcgcagtcccggaccagcttttgggcattcgggtcctccggggccaggtccagccagtgttttgcgtattcataggcggtggcggcggaggggtatgccatcagacaggaatagcccatcctggcgttccagtaggggtcgttctccccctgggtgcagacggactccaacaggtcaatggcgtgccggatgagagccccgtccactgcaccgtcggtcccatgcgctctatgatcccccagcaccgccagattgctgtaagcccggctcagcttgacggtcagaaaataaccccgctcctgctccgggatagcttcgatggcctcaatacatcgggagaactcgtccgcatcattccactgttcaagcagctccgacagctttgctgtctccgcctgattcatgacttcaccgcctttcccgtatcacccctgtatatccgcaccaatggggccttttttcagtgttccatccacagtgaccacatggccccagaacatatcatcgtcctcataccaagcggtaaaacgcccgccgggggagaccgaaaactcagtgagaatgatgcgccgggcgaactcatccccggtgatgggatctttctccgggtcccggtcggtctggtcattgtccgccagccattcgttggcctgagcggtgagcttctgggcagccatcgcccgcagggacttatcccagacttcctgatctgccagcagtttcttcatcacattggtggcgcgggtccaggacgctttcttttcaatctccacatccagcgagatctggacttcttttcccatccaccggcaggtcccggtgaacatactcatttcacgatccagcgtgagggttcccagcacctcgtcctccagaagaatgggctttgtgtattccgcccagagctcctccagtgccggacagggtacgccttcctccagtatctccgtgacataccactgaggttcgctgagggcatcgcctttccagccgcgggctttgatccggtaaatccggcccttggcaaaccgcttggaatagccgccggattcccgctccttgtccgtcagcggccagctcaggtagcatcggccggagatcacctgtccggtctggacatccgccatggcaagggcatgggtatgcgccgtccagaaagtatccagaaaggttttgtccgcgctggtaccgctctggatcagcaccagcttttccccatcttcctgggcgtacagggcaataaagtccttgaccgttctctttttcatgacgttctccttacgcaaatacctgctggtatttctctttcagttcctttggcaccgtcttgatgaccttgctgccgccgttttcagaggacgggccccagatggcccagagcaggctctgccaagcgatggcccggaatttcgggtccttgtcctcttccggcaggagatacgcggaaaagcggcgcttgactgtcagcagcgcatccaggctttccgcgttggcaatcaggctgcggaactcctttgcaggctttagattctgcatggacaatgcgccccgtaccaatacgcccagtgtccatggttggaaaccaaacttccggatcaaggcatgaaggaatttctcttgcagggaggagtgctcgtcatcgcagagatccagatactccgccaccagcggcgcccactgttctccttccagccccagagcgaacacagcaaaagagccgggcatggcgcaggcttcatccgcgaggttttggtaccactcatactcccgcatagccagacgagcgtatcgctctatagccggatgcagattggggtgttgcacagcgcaggcaaagagctgattgactcccttcttgggcaagccgggaatgggcagatagattttctcctttcctctgcactccaccgagtaactgcgggggaattcctcctgctccagcaccgcgcacaggtagtccaggatttcagcatagcactcctccgtggagtccctggcggtgatgcggatggtggcaaaggcgtcattggccgatgcggtgaaatgcaccgtcttacgttgttggatgtcctttggcaatttgccgctgccgttggttttcagtttctttaccatgtcgggacggatttgggaaaccaagccgaaaatgtgttcggtggtgagggattcaaaactctgcccatacacggtatggcagacagccacatagcaggcaaagcgcagcaatccttcgtccacatcctccggacgcaattccggccgcactgcgcagggcggaaagacggtaaagccatcttcccgctctcccacaaggaagcagcgttcctgcacctgcttttctatgtacttctccaactcatagcggatctcttcccagcccaccagccgccgcatggcgtcgcagatggaaaccgcatcctcgcagggaaattccttcagcggcagccgggaaagatgccgctccagcagctgattggggagaaagggcgttccgttatgatttcgcaccacggtcgggtaggcggcgtgattttcacgggcggcgccgctcagcacatcctgaatgcagagatccgcttccaccagcacctcagggtcagtatccggcttatggatcagataataacggccatgtacgccgtcacgctttggcaaactcatataggttctcccctcaggtctgctggtgctgcatggatacgatctggcagtccgggcagaactccacataaagcgcgccctctgcacagtcaaacaccgtatcccactggatctgggccaggtacttcatgggcttcccacagtgggggcaggtcgtatattccgcgtcctgcacccagttggcaaagccgccgatggtgttcacatcctcacaggccgcgccgtaaaacaggggcacaggcgctttgcccagtacaaagggattttcggtgagggccttgtagtcctcgggactgacatagcagtccatcttctccgccccgtcaaagagttcggagggaaagacctccacgccgccatccagagaaaagcggttgaaggcggggcctttcaggaatcccacgcagctggggcagcaggtggcggtcaggataccatccagccccaggaaccggagccgctcatccctgccatccaataccagcatgtccaccatacgcccgccgcagtggggacaggtgtcctcccgcgcccggccaatgcggacgggagatttctcgccagcggttcccttgaccataggatagcaggtgtcgaagttgagctggattttctggccctccttgttgaaggtccagcctccgatctgcgcatagctggatgggtccacatagaggcccttgcgccagggccggggatttcgctccagctccagcagcgtctccattgccttgtcatctccctgcatagcaaggcaactcatcaggttggaggcctcgctggaatattccgcggacaacagcgcatgaatcaggccatcccgcacatcggcgggagcgtgataatagatctcacagggccagaacacctctgcggccagtgccgcccgctggatctccggggcgatggcatcccggtcccccagcagctgccagaagtcggtgaactccgggtcctccatctccgccagcctctggatgttctgaatgagatttttctgcttttcgccaatttgttccggcgtccaggcaagagcagcttgccgatcctgctcgcacttacatttccagcacaatccctcatagcccaaagaggtcccacagccggggcaggcgtatttcaggctcatattcgttgactcctttccaaagacagaaagacgccccgcgacaccctgtcacttggacaggctgacgcagggcgtgaaaaggccgcaagaaagaagccacatctacccccagatgtggtttcctccacaggcaaaatccattttttatatagaatcaaagttatctttaactgattcgtgtgcatctccaaaaacttccgcctacatcacgcatgattccacgcgtatagtgtaagttgcttgtgatacttttatatggttagttgcttctcttcaaaccacaaggtcggatggttcttttccatcatacctaattacatggaaattatcaactaaaacttgcatcgataaaatcccagaaaccgctctctgttaggaaaacacatagatgatggctgacaactgcaacaggctctgcaaaggctatgcccagccctgcaaactaagctttcaggctgtggcggtgtttccctccattttcaaaagcataggaattaggattcaaaatggatagaggaactgtttgtggcactctttctttatagggcagcagaagacttccatgcggagcagcagggtgtttccgcatagaaaaatgccgaatttaaatctttgagcaggtaaattgagaacaccacaatcgaattagagcaattcgattgcggtgctcttttttgttaattacaggttaaaaagaattttttcttgcgttcttgtcagcagggccattgttgatgatataataaaaagcaatatacaccacacctgttaaaattaagaatttccgatatctgctttgctatatagcaataaggatcagttaataacagatgtatggagaaattcaaaggagcaaagtatgcgcaacctttttgtcattggaaacagatttgatcttgcgcacaatataaaacgggattcaaccattttagagactacttaagtgcaaactactcgatacttcacaatatgcgccatatgtaccagaagcaataacagagccattacggaaaagaactgcaagacactacagagatcgttggcttaatcgcatatcttttagacgaggctgccgcagacacaggaaaatgttttgataatgttgaacctcaatacgataaagaaggagaccgtatctattcttgggaatacgaaatgcagaatctatatgcgggaatatggcatgaacaattccatatattactgaactttccatggtaaaattcaaacttcccttttggtagacagcttgatattttattcaaagaggtgcatttgcgatggatatttctgtcctttatattattccgaatgaccggattattgaaactgtccaacgggttatgcagcgttgtgatgttaactatccggtatattatggaaccatgtccggagctttggaaattgcgaagcggatgatcgctcaggggagccgggtgattgtcagcaccggactgacggctctgtatttgcgcaagcatctttctgtgcctgttctggaactgctttttacaaatacggagtttgccagagccattcaggagggacttgctttttccgataagattctcatagttgccagtacctatgttaattattttgtccagcgcagtctggagttgtttcaaaatccaacccattctattcaggcggctgtgctgtctctcgaccgcccctttgaagagcaggttcaagaatatcttgaccaaggcgattttgacgtggtcatttcgtccacgcctggcgtgaagcaggcgcgaatcaacgggaaaatcgggattttgtttgacgttgatgaaaaaatggttgagttttccatacagactgcgcgttctttgctggattttgtagtacaccgcgcggaaaacgatcagctaatacacgctgttatgaattatacgcaagaagggcttattattacggaccgcgacgggatcatttcacagctcaacgcctctgcagagcgcattattggcactgtaaatgaggaagcctgcgggcagaatgccgaccagctgctggcgaatcgtcatattgtagattctcttaccaatgaaagtggtctggctgatccggaggcccatccggtcgttttgcagcgcaacacgatccaactggatggaaaatctgttggcatattactctccattcacgacatggcggatattcggatgctggaacgctctgccaaacgcattcatgagttgaacggccatgttgccacatggcgcctttccaatattattggcaaatcggaggctatttctcaggcccggcaaatggcgcgccgcttttctcagtacaacagcacggttttgatcctgggagagacgggcaccgggaaagagttgtttgcccaggggatccacaatgcgagtcctcgccgcaacgaaccttttctggcgattaactgtgctgccttaccggaacagttgctggaaagtgagctgttcggctatgtaaaaggtgcatttacaggcgcccgcagcaacgggaaaaccggtttatttgaagcagcaaatggaggtactattttcttggatgaaatcagtgagatcccacccaacatgcaggcgcgtctgcttcgggtgatccaagaacgtcaggtagtccggatcggtgatgacaaagtgatacccgttgatattcggatccttgctgccagcaatcgggatctgaggactcttgtgcagcagggggcattccgggcagacctctattaccggctgagcgtactggaattaaaggttccgcctttgtcctggcgcagagaggatattccgctactggcacagtcccttttacagaacaagaacaaggccctgaatacacacgttacgggatttgctcctgaggcgctggaagttctccaaagcctagaatggccggggaatattcgtcagctgtccaactttattgaacgcctgatgattttgtctgatccgccgcttattacgggggagaacgcccgcgcccttgcgcagaatgaggccacaaaagagctgcctgtttctagggagggccatttccctaccctggaggaagcggaatccaatctgattcgaaaggcattggatcagacgggaggcagccgtacagctgctgcgcagctgctgggtattcacccctcaactttgtggcggaaactacgggattttgatacagaaattcctctttgatgattgcataatgcacagtccccattgcatgatgcaactgttccagccgatttttgccttttttcggtagaaatcggctggattttcttatatggatatggcatgtaaattgctttatacttgtttaaagcgattgtgaattgctttgaagaaaagggggaattttcatggtatccgttggttgcagaatccacacgcatcccgcacgtacagatcccggtctggtggaacggtttcgcaatatcccggttgcgaatcttgacgactgcatgggacgtacagcagcgctctcctccgccatcaggccctatggcccgcgccggctgttagggcaggcatttactgtaagagtcccggcgggggacaatctgatgttccataaggccatggatatggctcagccaggagacgtttttgtgattgatgctttcggctgcgaagaacgctctatattgggggagctgatggtaagttactgtaaaatacggggtgcttccggcattgtggtggacggctgtatccgggacgcagacgccattcgggcgatgaatttccccatatatgcaaggggagttacgcccaatggcccctacaagaacgggccaggtgaaatcggtggagcagttgttgtaggtggacaggttattcgtcctggtgatattcttgcaggagacggcgacggaattgttgtaatacgtccggaggatgcggaggagattttggagcaggtcgaaaagctcatggccaacgagtcccgcactctcagtgagatgaagcagcatagtacatatatccgcccctgggtggacgagaagctggcagaattgaaatgtgaatatttatgaggtatccaaatgaaaatttttgtcaacgaacccatacatccggcagcaatggaactgctgcggtcacgggctgaagttgtctccgaatgggaggatgtcccggctgtcagcgcggcattggtgcggacaacaaaaattggacctgattttttaaatcgagcgaagcagctgcgcgtgatcggaaagcacgggatcgggtacgacaatattgacattgcatctgcgaaggagagagggattgctgttgtctatactcctttggcgaatgtcaactcggtggctgaactggcggtatctcttttccttgcgttggcccgaaagctggtttccgctcaaaaattgatacgttccggagagtgcaccaggatcgcgccccctgagctgacgggcactgagttgagcggaaagacagtggccctgatcggccttggacacattgcacagcaggttgcacagattctaggagtcggttttcactgccaccttgtgggatatgacccatatgtttcccgggaaaaaatggctacgctcgacattgagaaagcagattgtttgaaagaagcgctgagggcgggagatttgatcaacatcagcgtgcccctcaatgacagcacccgtggtatgatcggctccgcggaactgggcgtctgtcgccccactgcaattctggtcaatacggcacgtggcgggattgtagatgaggtggcgctctatgaagcgctgtcccgtaatgagctggctgcggcagcaagtgatgtttttgccgtcgagcctcccggtgtggatatgccgctgatgtctttacccaattttctgcccactccgcatataggagccaatacggaggaggcgctttatcgtatggggattacggtagtggaagatcttttcgccgttctgaacggtgtttctccacgatttcctgttccgtaaacggatgagataaaagaaaggagattcactatgcaacccaaaaattccattcgtcgaaagcctgcttttccggacggcatgttgatcgtccttggagtcatcatactgtgtgtcatcgtgacttggtttattccttcgggtcaatacgaccgtattttagatgccagcggacggcagatcgttgatccaaactctttccattatattgaaagcgaaaaaatcagtctcctgcgtattccacactttattgtagagggtacgattgcacaagcggaaatgattttcttcctgctgacgatcggtggctgctatgaaatcgtaatgcacaccggagtgcttcaggcgatcatagccagaatggccaaatggaaagtgcgggacatggcgtttatactggtctttacgctggtgtttgccgtgatcgcagctcctgctggcggtgtagtgtctttcatcggatttgcgcccatttttgtcatgatcgcccgggccatgggctatgatgcgcttgtgggcgtctctctggtgctgctaggaggtgctgtgggtgctgctgctggaccgatcactccctttaccacaggcgttgcccagggaattgcagaactgccgctgtattccggcctgtcttaccggataatctgcatgcttgttttgtggattgttacagccctctttattgctcggtatgctaaaaaagttcggttggatccctcaaagagctatgtttacgatcttgagcaggtgcagaagaatcaagaagtagaaaagcactatgacaccgatctttcggctcaacagatcgctattctggtgatttttattttaggcttgtgcctgatcatctatggcagccttcgcctgaactggggcaatcgagttcatatgcagatctatctgtgcatgagcgtgattcttgcgattgttggtaagttcaatcccaatgagacagtccgggtctttgtgcgaggagccaaggggatgctggccgcagctctggtactggggctttcccgcagtattagcatgattctggatgaggcgctggttctggacaccgttatttacggctgcgctgcgattttgaacgggcttcccacgttgctgcgggggccggctatgctgattgccaatacggttgtcaatgttttcattatttctggaagcgggcaggctgccgcagttatgccggtgttcatccctgttgcggatttggtggggctgactcgtcaaaccgctgtgctggccttcaatttcggcgatggcttttccaactggatccttccgcattctgctccgctgatgggatttattggtgctaccagcatctcctacggaaaatggtttaaatacttctggaagctattcctgctttggaatgccttggccatggcgcttctttttattgcacagttaatgaactatgggcctttctaaatgaaaaggagatcacgatctatgatgacaaaagaagaaattctgaatgctgcaaaaaaatgggaagatttttgcatcgctctgcgcagggatttccatgaatcccctgaattgtccgggcaggaaactcaaacaattgctcgtatttgtactgagttacgtgctgtgggactctctcccatcgaagtgcaagatggtggtgttttagcggtaatcgagggagatgctcctggcaaaaccgtgcttttgcgggcggacgtggatgcacttcctgttcaggaggatccgtgcaatcttttgcgcaagaaagaatgtgtcagcaagatccccggcgtgtcccatgtgtgcggccatgactgccatgcagccatgctggtcactgtggggaagattcttgcagcccgtcgggattttcctgggcgaattgtgctcatgtttgaacgcggtgaagaagggggcggcaatctccggtatctcattgattatctgcaaaagaaccattgggacattgatggagtttggggcatgcacctaaacagtgatattcccgcaggaaaatttgcgattcgaagtggaccgttgatggctgggggactgatgtttgacatcacattggtgggtaaggacggacatggttcaaggccggattgggccaataatcctgtggattgctttcagacgattcaaacagcattggataaaattcgtatgcgcgcggtagatccaaatgatgcaattaccttttcgatttgcagggtgtcaacggagtcccagcggcccaatattattggacgaactttaaattttgccggtacagttcgttactttgatttggaaagagcataccgtcctttcagcaaggcaatgcggcgaattattgataatattgccgatgcttttgaatgcgaagcagtatataatcagtttgagtgtattgcagtccctcttatcaatcaatctgattgttatgaaattgcaaagcagacattgacggagatttttggagaagatcgtgtagtgcaggggccattgaagtttggatcagagacactttcctatgtaatgagcttttggccgggtatgtatttgaatttgggtattaaagatcccacattgggtactggatccggtcatcatacggccaaattcgatgtagatgaatcgcagttcaaaaccggtgtcgcggcacacatcggatatgccctggccttcttggaaagctcaaagaaaatacaggatttcaagccttatgatggagatatttgggatctgttaggcgaataggtaaatggattttaaggagtcaccagaaaaacattgatatctattctggcacctatgatgaactgttttacagtagcggttatatttttaaccttgccctgtgcacagatgggcaggtcgaaatgacctctcggaagaattgggtactccattaacaaggggaagcccttgaaaacaatgttttatggagacattttctgcgaagattttcttgtttatggggatacccgactgttcaagcaggtcttcatattaccatccggttaaaaaaacacagtacaccggatgatggaggatatcttcccatccggtgtgctgtcttttggaatccactttaactgatcccatgcagtagaattttggcttcatatgcagattatggcgtggagatgctgaaataatccggaatatgcttggtaaacacactgccagagccaaattcataaaggattggaggcgtctcccttgtttcattttaaataattgttagtcagcttctctatccctaaaaacagaaggtggctacattatactcaagcaggatcagcctcccctcatcgtcaaagggaccgatgcccatgccgtagcgcatggggcttggctccctccgtgccagtgtcaagtgcgcccgcgtccccgggcgtttggccgggttccagaaccagagacgccctggagcggaaagcggacaccggatcttgatttcctgacagcagaaaatgtctgctttggacttggcggggatgcgcaaaagcttttgcgcttgcaggcgcaaagccgttgacattccagaccactgtcttcatgactgcagcccctccctgcccaccgaagtgggctttggcatgccccaagccggcagtataaaatctcttccagaaaaatacaatgcctgcccttgccgaatttgtcaagagcaggcattgttgtttcctccttgcagcggtttttcaggggcgttgcaattataaccaaaccagagccgaatgggggaagccttccgaaatttctccggataggacattccgcagtctgtgggggctatttttgccgcaaataattaccggcaacttggccagaaagagtcaccagagtaattcgtttctatattcggcttatgctggtaagaaactgtataacactgttgggtgaagagcagatgatgttgttgatcttgatgccatcagctgcgtggcctcaaaattccaggaggcagcccgcatatccataccgatctttgtgcggttgacgagccggggcagtaccaccagcaccgcctccaggaacggcgtgatcaccttcgccatcctggtagacggcttgacaacggtgatctggctggacgggccgggcaggcatctctcggctcattccccacgaagcagtgacctgccgcccaaaatcatcctaagatttgtacaagatattccattgacttgcctgtgtctctatgatacgtttgactcaaatttgcagcttacgacaggaggcttctatgcgctcagaaatcggagtcggcatcatcggatgcggcagcgttgccagatggaaatatgttaaaaacctggcagagatgtcaggcgtctctcttcgggccttctatggtggccgggctgaggagttccagcagcaatacggtgctccgggctccgcagtctgtcgagatctggcggaatttttggcccgtgaagacgttgatgccgtctgtatctgtacgccgaacaacagccatgcagaaattgccctggcagccctgcgcgcaagaaagcatgtgctgtgcgaaaagcccatggccatctccgctgaggatgccgttcggatggtcgagacagcggaacagatgggcgtcctgttgacagtggggcaccagtcccggttctctcccgccgctcaggccctttaccgccaactgcgggaaggcgccttcggctccctctactttgcccgggccagcatggtccggcggatgggaatccccacttgggggcactttttcgacccagcagtccagggtggcggatgtctgatcgatctgggcactcacgctctggatctggctctgtggttgctgaacgatttttccccggcctattgctgcgccggcatctttcgaggcccgggagactcccctactcccgccaaccgttggggcacttgggaccccgccatgctccggacggagaccggtgcctttggacaggttgtgctgcaaagcggcacggtgctgagtctggatatcagttgggcccttcacgtgccggaagaccgggaagagaccgttacgctctgcggcacagccgccggggcggagctctttcccggcggctatacaatcagcggcacacagggcgcccgcttggtcactacccgctatcagatgccggaggaggagcagagcgcaaatcgggcgcaactggaggattttttatcttccatccgggagcatcggctgcctctggtaacagcagcgcagtctttagtcgtaatgcagatcctatcaggactttaccgctccgcgcgggaacttcgtcctgtggaattttaaggaggatgcaactatgcacgaagaaaaagtagctctcaccaagaaccagatcgcggcgctccggagagcggcagagactcgttccattcaggacatctttgtagtggcctgtggcggctctttggccactctgtaccccattctgtacattctggatcgtgagacgaatgccgtccatgtatcctctgtcaatgcagcggaattcttccataacccgccacaccggttgggagatcacagcctggttatcttgaattctcaaagcggcacaacaccggagaccgtttccgccgcccgtttagcgcacgaacgcggggcgcttactgcggcgtttaccacagtaccaggctccgctatcgagactgtggtggattttcccatttactattatgacgatccgataaatccctatcctctgctgctctccatttttccggaggtttaccagctggcctttgctcttgtggatctgttgaacggcagtaattgtctccccggcatggaaaccgctatggaacatctggaggccgtatgtcagcgtgcggtttcagacttcgctcctcaggcccgggagtttgcccggaaacaccgcacggaacagctcatttacacggtctctgctggtcttgaccgatgcatcgcctatattctcaccaactgctcttttatggagtctgtatggcgtcattcctctcctcttcacgccggagaactcttccatggcgcctgcgaagctattggaaaagacacccctgttgtggcttttctagggctcggccgttgccgcccggtagaagagcgggctgtgaagtttctgcagcgggtcaccgataagttaaccgtcttagacgccgccgccttggatctcactgaaatcccagaggaattacaagagtatattgcgcctctagtgcttcactccctagcctcagatttctgtttacagttgtcccatctcaccggtcatcccatgagttcccggcgctatatgggcgtagtaaaattttaaacgaggtgtcataatgaaactgctgggactgggtgacaacgtatttgacgcctatttgtttcgagacgaactctatcccggtgggaacgccgccaatgtgtccgtactggcccgccggatcggtgctgaatatacaggctacctgggagtgctggcagatgatccaccaggtcgtcatttcctggccgccctcagggaggaatccgtggaagtcagccgtgtccgtattggtgtgggcaaatccgcatgtaactatattgtgttggatgaccatggagaccgcacgttctcaggaaataatggcaaagagaccgtgcaaaatcttttctctctacacctgacgccgcaagatctggcatatgccgccgctttcgatgtgatccacaccagtatccacagcggtatttccaacgcggtgctgggcggtctatcccgccgggcagatctgtccatggatttctccaatgacggctttactcacacaaacgtggcggaacttgcgccgatccttcgttttgccttcttctctgccggagaaaggtctttggaagaagtccacacttttgcaaaatatgccgccgactgtgggatcccccaagtaatctttactatggggactcgcggcgcttgtggaatctcccagggccagttttggcaagcggatgcctgtgttattcagcctgtggatgctttaggtgccggagatgcctttattgccgcctttttatatactttctgggaaaatggcggtagtgctcttttggcggcagaacaggcggcgcatttcgccgcagactgctgtctccactatggcgccttcggtcatccgctttctctggcggaaagcgacttgctttccacaggcccccaaaattagactgagaaaacaggctccggtggttttccaccggagcctgtttactgtactctttacggatttttcatttccaccaactcccttggcaacaggcctgcagcatcctggtccaaaagccagatacaattggggtgcttctggaggatggaggccggcagttcgttggtaaccggaccggtaatggctttgaaaacgatctccgccttttgaacaccgctggccagcaaaatcacaagctctgactccatgatctgagcgatgccctgtgtgatcccctcagcaagcggtaactcacggccaccgaagtacttcttctgtacagccttcgtcaccgcgctcagcggcgttctgtgcgaacgcagagaaaagtccaccccgttttcattaaagcccaaatggccgttcatcccaatgcccagcacctccacggcaatggggccataacggcggatgaaggcatcctgctctttcagctggcaatcgatggcagcaatcctgcttccgtcaaacagaaacttatcggcaaacgggcggtgcatgggagtcagcagttgggtgttcacaaagtgggagcagctcccctcatcctgaggcccgatacctacccagtcatccagttgtacaaacttcacccctgttggatcaatcattccgctgttgacgcggctcacgaactccctcagcatcccaaccggtgtatctccgcccggaaagctaaccaggcactgcgggtctttctctatggccttctgcaccaggtcagtcgcacaccggctcattgcctcataatccttttcaacaactactctcatgatttttcctcctctgcaactgtcacagcaatcatagcacaaatcgtccggcactgttaggacaattccatcctgatgtctggatttttttgttctctttttctggggacaaaaaaatcctagaaatctcacgagaatcttcattgtactcgtcctgtgatttggatagaataaagatgctatcgctatacaagtcatagtacacaaacagaagggagcatttttatggtcaaagttggaattatcggggtgggcacggtgtctcagatgatgcaccttcccattctcagcggccttcacgatctttaccagattacggcggtatccgatgtgtctcccacgcaactaaagcatattgcggagacttatcgtgcgaaagcctatgcagacccctatatgttggtgaaagcccccgatgtagatgccgtcttcatctgctcacctgaccagtatcacgcagactacgcccttgctgccattgaggccggaaagcatgtgtttgtggaaaagcctgtgacgctctgtattgaagatctggaaaagctaatcgccgctgaaaaagctcatcctgagcttgtgtgcatggtcggctacatgcgccgttacagccaaggcttcctgaaatgcaaggaactcttggccagcgatgatcgcaagattgaatacatgcgcttccgggatattattctggaaggcgacttctttatggatcagacccgtcctccctatctatgcagcgacatctccgacgaggtcaaggcggaaagttcctcccgccgccgggatcagatcactcgcgcgcttggcaacgactgcacggatcagcagcgcaccacttatgtgatgctcacaggcctcggttgccacaccctggccgctgtgcgagaactggtagggctgcctgtggaggtggaatctgtctccgtccagggagaacatgtcattattgttttccgatacaatgatttcttggccgtctatgagattctcaacgatcaggatgtggtgcaattcgacgccgccatcgagatctatcagcatgatcgtcgaatgaaaatcaagtatgagacgccctatctgcgttatcagcctcatacatttgaagtgattgagtccacaaagaaggataccaagaccaccctttatggtcctgattatcgcgaccccttccaggatgaggtccagtatttccatgactgcattgccaacggaaccacacctaagtccgattttgcagatgctatggctgatttggtactgttccgggagatctgcggcaagatcaaaaaatgatgaagagtacgctgcttcaagaatatattgcccagcagcccgccctgtggcgggctctgctggattcccgcgaggaaatcaccgcagaattttcccggcgtttcgggggatttcagccggatcgggtgattctggtcggttccggttcctctcactatgccgccctgatggcccgcccggttctagagcatgcctggggaacagaggtcacctgccttgtcccctccgaggcagcggatgcccgccttactgcagcacacccgctgtattttgccatttcgcaaagcggcgtcagcaccaatacctatgatttggtctgtcaactgaccaacgcaggcagggctgtgattgccgttacggaacaggcaaactctcccgtagggctagccgcctctctgtccgttcctcttcgaatcggaacagaacggatcggtgccaaaaccaagggcgtcaccgccactgtgctgacattaatgctgttagcgttgtctgtctgccaagacacgtcctatgggcagagaatgcttcaggccttggatcgactgtgccggaacgctccggaaaacctgtcccgttcccgtgcgtggagccacgcgcatcggaacgtgttcctgccgttccgtcacctgtatgtgctcggctgcggcaacagtctcggagccgcgcaggaaggagcgctgaagctgctggagaccaattatcttccagtttcctgctatcctttggacgagtatatccatggtatccaaaacgccctggacggcgatgcctgccttttgtgcctgctgccgtcccaagggccagatcgggaccggatgctgcgcctagtgaatttctccaaatcagttggggcctgctgcggcttgatctcccccagcgacaccggccagccggacgctcttcacctgctggatgccggagaagatgccctccagtccttagagtttcttcttgctttgcagacgctggccgcggagctttccgctgccagagggatcgattcctcccatcggcgctactcggatttcttctctatcatgggcagcaagatggagggagatatatgccagccaaagctctaaaccggcgctttttcctgctccaggctattatgatgctgatagactgcattacagtggcttacatatctcccattctggtctcctttggatactccaagctacagattggccaagtaatgacactgggtgccctagcagccacgttagcccgccccctatgggggtttctcaatgaccggttctcctgtgccaagcaggtgacattaggcgggacggcggtcgggatcgcctgttattttctgctgacctggggtggcggtcagatggggctgaccaccatagcggtaatggggttgtacatcactgtcgtctgtatgatgaactttgtggactcctgggctctccgtctgatcaacggcggtgcatccctgaactatggtgctacccgggcaggcgggtctctctcttacgctctcggtgccgccatcttcggcatggtagtctcacgctggggctttcgtccaggcaacgtggctctgtgggtgctctggattttgatgtgtgtggttgccctgtctttaccgaatcctccgcccgccagccatcttgaccagaagccggtcactctacttcaagggttccgcacactgcgatccaatcgcgtctattgggtgatgctggccgctctgtttctttgtactctggcctccgggtccatggagagcttctactctgtgctgattctatctgccggaggaacagagcagcatgttgggttcgccctgtttcttcaggccaccagtgagttgcctgtgatgtttggctacagtcggctgcgctccaggctgcatttgtcagcagcccccctgatggcagtttctatgctgtgctatgcgctgaaagccctgactctcgccagcgccggctctctgaatattatccttgttgcagccctgtttcaggcgctttcctttgcgcttttcacccccgcctgcgtggactttatgctggagactgtgcccggggagtacctagccatggggcaccttctgtttctggccattggtcagggtatcggtgccgtggcagggaatgccctcagcgggatcctatcagaatatcttggcatggcctggatgttccgcacggtcggattccttgcgttgctggccagtgtcctggcctgctgctccgcaaagatgttgaagaggaggaatttctcgtgatctttttaggctgtgatggaggctctaccaaaacagagtggctcctagtagaccacaccggccaagtgctggctcatcggatttttcccggctgcaactttgcattttggggtgaggacgggttccgggacctgatggtccgctctgttcagaccctgctggcagacagcggcatcacttctcagcagattacgtccgccatgctgagcctgactgtttacggagaggttcccggtaccgaggagttcttcccccaagtcatgcaatccatcctgcctgactgccctcttcagttttccaatgactctgtggcaggctggtgtggcagtctggccggccggcccggcatcaacattgtagccggcaccggttctgtcgcctatggccaagattcggccggaaacgcctctcgcgtaggaggctggtctctgttttttgcagatgagggttcctgcagctgggtagcccggcaaatgatcaccgaatttgtaaagcaggcagatggccggcatccccgatctgccatctatgaagaattgcggcaggagctgtccattactcacgatctatatttctccggatatctgcagacaaatgtccggcaggattcctcgctgttggcaaagctgcagctggttgtcttgcgggctgcacagcggggagacccagcagccataggtatctaccaccgtgcggctgaggagctgacggaaatggccactgctattcggcagcagttgaccttctccgcaggagagactgtgccagtctcgtactccggcggcctgttccgtgctggagaagtcatcatgactcccttccgcgcctgcatggaccgggagagctttgtgctgaatgaacctcggtacagtccggtgctaggagcactgatcctggccgctcgcgggttcctctccctggaggaaagcgacgccatggctgaccgaacggcggcccagttgacaaccgccccatccgtccaataaggcttctggaggttatcaaaatgaaaatcatccacgcaaaagattataatgacctcagccgcaaagccgccaacatcatatccgcccaggtaattttgaagccggagagtgtacttggcctagccaccggttcctcacctctcggaatttaccggcagctgattatttggtatgaaaaaggagatctggatttttctgctaccactgccgtgaatttggacgagtactgtaatctgccgccggacaatccacagagctaccacgccttcatgcgccaaaatttcttcgaccatatcaatatcaaccctgcccgggtccatattcccaacggcatggcctcagacttggagacagagtgccgccgctatgaccaattaatccaatccctgggcggaatcgacctgcagctgcttggaatcggccgcaatgctcacattggatttaacgagccggacagctgcttttccaaatatacgcacaaggtagcattgtcagagagcaccatcgctgccaacacccgtttttttgatcgggaggaggatgttcctcgtcaggccatttctatggggatgcaggccattactcaggcccgtaagatcctgctgattgccagcggtcccgataaggcagacgctctctgcgcctgctgtttcggtccggtaacgccacaagtcccagcctccatccttcagcttcatcaggatgtcaccatcatcgccgatgaagaatcgctgtccaagtgcccctccaatgttcctgtttctgccgccaagtgaaggagcagtcgtatacgtcaatactgggacggattaaaaagtcaaagagggtatcagatagtaaatctcgagaagtctaagggcttctcgagatttctcattttgagaggtgccgggaaagattggcgcgtgggaatggaaacaccaggcaaagccggagcatttggaggacgctgcaaatatcaaatggtggtttgaggaatgcagaggaggacacggctttgccgcgctctccagctgcgaagaatctcaggacagttcatccattgccacatcgggcaggtgtatagggtcaagctgccctctgttgcaacgttgagcgagtgaatcagcaaagtccctgtcatatgtaggccatcctccgggcgggctgctccaccttcagcccctccatcagacagcggtactgctgcggcgtcaaccgccgtacctccttttcgttttgcggccgttggtatgcgcctgctccagccgcttatagcttatacagcaggatgcatccatcccggtccctgcagaactccttgatgcagtcccgccgtctgccgcagaacagaaacagcgtgttggtgaacgggtccggtttaaaccgttgctgcaccatggcagccaccccatcgatccccttccccgacagttgcataacgccggagcattgtcgcttttcccattgcaggggtgtaaaacactcttggcatgcaaatttgttcatcgtgccgtttaatgaatattaagagcgggcaagcagaactgcttgcccgctctcttttgtctgttttggccgaagcggtcctcagaaattctctgaagaccgctctccgttttcggacttcgccttattggatgaggtggattttttgcagataggccagattcttcttggccttttcaaatgcctcctgtgtggtggcgtgggggcaatcctgttcgatgatcccgactccccggaaattcaaacgatccagcaaatcccggtaagcttcgtaatcaatgatcccatcctccagatcgcacataatatcatccatccggggatcatctggtgccagagcaccctccatctccatctttctgatctcaccagatacatttttgaagtggagatagggaatatgatcgatatgagcctccaggaaatccaacgcgctgcggtcgccctgcttccaattcccattggccgcagcatagtggccgttatcaaagcaaatgcatagatccagatcaatcagtcgctccaactcctcccgggtctcgatcagagagcgcctctccggatgcatcagaacctcaataccgtaggtgtcccggcagtaactgcccatttccccgaaaagcttataggtcctgatttgctgctccttgaggccggccttggtcttgcagtccatggcggttccgtccattgtcatcaggtaatgcacatcgaatgcctgcaggcgcttgcacaaatcatccacatcccctcggacatcggcaaaggaacgtgccttgagaaaatcatagcaagctgttccgccgcagatagaaaggtcccggcgagccagttcttccctcagttggccaatatctgtgggcagataccccactggtcccagttccagggccttatatccagcttctgccgcctggtccaaaaagatatcatacggggtgccagagggagttccatccggccaccagactccccaagaacagggggcagttccaattgttacttgcaagctcatgatttgatcttcctttccatttcatctgctccggagcgttcacggtattctttcggtttcaggcctgttgactttttaaaaattttagagaaatataccgggtcatagatacctacagcctccgcgatttcatatgcttttttatctgtggtccgcagcaaaaatttagcacgctcaaccctggtattaagaatataggtactcaaattctctcccatctcccgcttaaacagcttgctgaaataactgggacttagatgcaccatcgttgccagcgcatccaatgagagattggtgctgtaattttggtcaatgtactgttttaccttgtaaatgatactgtcgatattctcctctgtcctcccgatccgggacagggtctctgtcacatactcccgcacactgttctccagaagctccatgctcccagtgggcaaagccgttagctgttcggcgggcagattgtggctgaacagaagactcacacagaagttctgcaataaaagggcgatctgacacacgctggagaaaggaattttctgtgcttttatcaattggaagagatcctccatgtttttcagagccgcatcaccactgtgattttccagggcgctttccaccaaacgcaaccgctcccacagagcactggctgtgtcttcggacaactttggcaggtcctcacaccgcatgacggatggctggctactatacaacgcaaatttctgtgcgtcatccgcctctctggccgccttctgcatattcagtggatttttgtggaggcggctaattccgatcgtcagcaggaaatccgtttttccttctaccgcttctacagccgaagtgcagagttcagcggggtctattccctccggcaatgagagaactgcatagcagcaagtatcgctcttcggtaccaaaaacactgtatgcccctcgcagcaggacagtatgacctcctgcgcttgctggagcatcgctgtgcattcctccaaagttccccggaaaaccacctccaggctcagaacataataactgggcagcacaatgtgcaggtcattgagtttattgagaatgtaaagcagcgagtgtcggctttgaaaaatcagttctcccaacagagcctgctgttccagcaggaggctcttctgcacacggctttccttttgaagccgttggcatgccttgtccactgcagcggagagcgccttctccgtggtaggcttcagaacgaaatccgtcaccccacactggatagcctgttgagcatactcaaagtccggaaagcctgtaagcaaaatcatctgaatgcccggatagtgttcccggacccagccgcaaagttgcagtccgtccatctccggcatgcgaatgtctgtaatcagaatgtccggtggggactcctgaatttgatggacagcatctactccgtcgtttgcaattgctcgcacacagcagttgtgagccttccagtcaatcaaacacatcagccctcggggaattatcgcttcattgtccacaagcatcacagtgtacggcatggtttctcacccctttgtttgatcaagcggcaaagtcagcagcacggtggtaccctgaccgggtttcgaacggatctgcagatccgcccggtctccatatagcagatgcagacggcgaagtacatttgttagtgcaatatgattgtgctgtccggcactttccacctctcttgcgagatccagattttccggatcaaagcctacgccatcatcctcaattcgcacacaaatattctgcgtctcctcccacagccggactgccacgcttcctaagccccgccggggttccagcccgtggacgatggcgttttccaccagaggctggatcgtcagccgcggaaccaggtaccgcaaaaggtcctcgtcctcgtattccactgagtaagagagcttttccccaaatcgttctctctgtaaatccaaataatagtggacgtaaccgagctcctgttcaaatgtaattttctggctgcttcccacaccgatatttccccgaagcaggcacgccaggtccgtaaccatacgggaaatatttttcaatccagcatccacgcaacgcatattgatggtctccagcacattaaagatgaagtgcggattgatctgcgcagccaacaggcgtgattcgctctcctgcaatcgaatgcccttttgataggcatccttccaggatgcctccagattatcagccatctggttaaatgtagtttccagatcagccagttcccgatagccgctgtcaggcatacgggcggcatagtctgactccgccatccggtgcagcatcccctccattttctgcagcggatcccccagcactcgatgataggcgaccgcagccgccagaaccgtcagcagcacaatcgcgatacacagggctgagaaaatccaactcccctcccaaaccaaatcgtacatggacggaagtggtataaaaatatccacccgcagctcctcatcgtccacacgctgactgacatggtaaaagcggccctgccaacccggggcagttccttggagataggaagagttatcctcagtctgctccagaagttcttgcaggtcctccccctccccgtatagcagttttccctctccatctgagagcgccaagcatgtgtttggatagagttccgtcaagtctccagcattcagtaaagtatctacatcaatctccataatcagcttgcccaacggttccagcgtatcgatattcttatagtccagcaaaaaataggcggtgttctctggcgtattctctatggaaaacagcgtctctgctgaagattgttcgtttgcagcctcatagatactctgcattcggcgctgctcctgctcataggaccccctgggggagtaaaaggtgaacgccccatccctgcgaaaaaggtacacgctgtttaccgctccccgtttccaagtggattggtaagccgccactccccccacgacccgaagcaggtcatcccgtccctgcaaagccagatacatgtccaaatcctgcatacttgcacacaggctatcgtctatcatggcattatacgcgatgtcctgtgccaattccatagtgttggcaacagatgcagtcacttggctgatgtagaaatttacatttcccttggcctgtgattccattctagcagggatcgtacgatagaacaccagaagcatcagtagtgacggtcccaaaatcgtcacacagaccagtaaaaacattctgaccatgagagaccgcttccgcctgacatttccccgtctatgtgccatttccttcaccgcctcgggccgcctaacttttctcttgggttcattgtacaatgaggattttcctttttcaacactgaaatctgtaaatctcccgccctcttctctctccgccttcggcggcaaaaattgagcgaatttataccagaatcagagcaaaagagtcttaatatttgtagtcttttccgtgatatactgagaaagcatacaggaggggtgtagctatacccctgaaacgaaggaggaacacgataatgaagatgaaaagatggttgtcttgcacactggctctggccatgctcctcggtctgatgggctgcggcggcaccagcgatgaggcccccaatgatggtagcggctcctctgaagatgagattgtaatcaactatcccactttccagatcgggaccaacacggctgcccccgtggtggaggaattggtcagtcgcttcaacgaagaatatgcgggccagtatcgcattgaggttgaggagatccccggagatgccaattatgctgatcgaattcaagtccaaatctcttccggcaaactgcctcccgtggtctacggtggcggatacagcttgctggacttagccctggaagctgatctggttgtagacctgaccgacgtggtgaacgaggatcccgaatgggcttccatgtatgaaaacgacgcctggcaggctgccaactgccgcgatggaaagatctatgcttcctccaatgaaggtcagttgattggctacttctacaataaggagttatttgaccaggctggtattcagcccgctaccacttggaatgagttttttgacaactgcgacaaactgctggctgcaggcatcactccactggctatggacaccgctgacggtgcttgggtctccatgctgctgatgggcgccatggttgccaccagcggcgatgagggcctggagttcatgaacaccaagtatcccaccgactacaacattgagccggttgtcaacgctgtcgccgagatgcagaagtggtatcagaactacaccacgctggacgctgtgggcggcgcctatgagaacgcggccaacaacttcttctcaggcaacgtggccatgatctgcaacggcccctggatgatcggtgatttctctgacacctccaagacgcctgatggctttgatcagaacgtgggtgtggctgcctatcccggcaacttcgtctatgacgcccccattgaaggcatgtttgtcaccaagcaggacgatcctgccctggaggaggcggccatcgccatggtgaagttcttcaccagccccgagtctcagcagctggcactggagatgcagggcatggtccccgccgctgcctctgtggaaatcactgataccgctaccaccaacttcccgttgctgggcgagtttctgaacatagcctccgaatgcacggtacgttccaacaccttcaccggcaacatggttcccggcctacaagatctcttcagtgccgagttgcccaacctggccaatggcacctacacaccggagcagttctgccagatcctcacagattttgctgcggcaaacgccgtgtcctgatctttccgccagagatggcgtagacgaaactccggaagcccgtgaccgcaatctgcgcacaaaggatcgggttgccctagcggcagcccgatcttccctatccttggacaaggagatggaatttgatgaaacaaaaaaatggcgggtggatcgccctgtttttagcgccagcatgtatcctctttatcctgatcttcgcaatcccgctggtaatggtgttcgttacatcgctgttcgattaccgcctgctgccccgcaccttcacctttgtcggattttccaattttgttcagctgtttacggaggacaatcgcttttggcccatctttggcaacacggtcaagtggctttttatccattgcatcttccacgtgactcttggtacgctactagccttcatcctgtataaaaaacccagaggctggaaattcgttcgtgtgacttacatgattccaaatattatctcccagtccgctatcgccatgatctttctgaacttgtacaatgcccaatacggtgcggtaaattcgttcttgaagttggtcgggcttgagagtttacagcacaactggttgttcgagacggcaactgcgttcccgtccgtcactttgacttggttcctgttcgcaggatacaccaccacgttggtcctggctcagttgttgagcacggatgagagcttgatcgaggctgcggagattgacggtgccaccagtttccagatcgaccgtctggtgatgttcccggtggtcaagaaaatgatcggtaccacggtcattatggccgctacatacatgctacagctgttctccatgctctatatcaccaccggcggcggcccgggtacagtcactaccaatctgccgctgtatctatacaccactatgaaggccaacaattacggctatgccaatacaatcggagttgtaatcattctgttgggcttcatcactatgacgctgatccgcaagatcttcggcatgaataaggaagactaaggagagaatcggaatgttggcacattataagagaacgcctacccagaaggtcacccgtggattttcctatctgttcatggcactatgtgtgtgcgtggcgctgctccccattatctgggtcattttgtcctccttcaagaccaacagcgagatcttttccaatggcctgtccttgccctcccacttcggctttgacgggtatgtgcaggcactcgagatcgccccgatcctgaagtttttcgcaaatagcctgatagttgccaccatcacaacgattctgaatgtgttctgcctagctatggcggggtatgtgttcgccaagaagaggtttcgcttcaagaacacgatttttgccattctttccttgtccatggtgattcccaccacggcgctgatgagtcccgtgtacaatatcatcacaaagctgggcctctatgatactaagattgcgctgattctggtgtacacagcgctgaatatgcctatttctctgatggtgctccgatctgcgttcgcctctattcccacagagctggaggaggccgcctatattgatggcgccggctttttccgtacctttgtccaggtaatgatgccctgcgccaagggcggcttggccagtgcggcggtgctgacttttttggagagctggaacgagtttacctttgctctgctactcaccagctccacagacaaccggaccctgcccctgtccctgagctatttcaccagccagttcagttttaactacacggcaatgtttgctgccatcactattgcggtgctgcccagcatcattgtattcgctatcttccaagagcaggtgaatgccagtttgactgccggatcggtaaaaggctgaggccttctttttcgattccctttcagtccatggaaacccgtgtcccacaggtttgcttcctgttctgaacttcgttgaaaatccccggccttttcgataaaggaaaaggccggggattttgatgcgtttctggactcttagtactccagattgacactttctgtgttgaagatgtggcagatatttccgccgaaacagaagtccggttcccgcccgggagcaaaccgctccgtatagctcccgctgatattcatagtgggaacgacgatgactgcattctttcccgcagccatagcatgaagatggatcccattacccaatcatttcgaacacatctaccttggccaagatataacctccttctcccttccccaacatgatgtgattgggccgggcacccaatgtaacaggctgtccagaaatccctttcttggtcaagtcagcactcttttcaagtgacaactccaccttgatgccgccaagtatcacagagtaccggtctccttccctttgcagctccgcatcaaaaaaattcatctgcggcgtaccgatgaagttagccgcgaacagattggcaggatggtcaaaaacctcctgaggcgtaccgatctgttggatgaagccatccttcatgataacaatccggtcccccagagtcatagcctctgtttgatcatgggtgacatagaggaaggtagtattgatcttctggcgcagtttgataatctctgcgcgcatctgattacgcagcttggcgtccaagttgctgagaggctcgtccatcagcaggatcttgggttcccgtacgatagcgcggccaatcgccacacgctgccgctgcccaccggataaagcttttggcttgcggtccaggtactgcgtaatgtctaggatctccgccgcctcacgtacagctttgtcaatctcgctcttagggcgcttgcgcagcttcagtgggaacgccatattttcatacactgtcatatggggatagagcgcgtagttctggaacaccatagcgatgtcccggtctttaggggctacatcgttcatcaacttcccatcaatgtacagttctccgctggagatctcctccagccccgccaccattcgcagagtggtcgacttgccgcaaccagaggggccgaccaatttccccttgaatttttgtttaatataagcatttgatttttcatgatctctcaattcatgtgctcactcctcatggcagatgatccattcccattcggacagccctgaactgtgggcgctaccttgttatgacggccccaagtcttcaatcctttgctgcactccgcattatctttgaaatcagagcggatacgtccgtgtttcccgcctcgaagcacctttattcttgagccaggttgacaccgcaaaatgacgggaactccgagaaaaagaaagccgccgaaatcagccgggcctaagctcctttgatcatccggcgacttctattgacagagctattgataacttccccacctttcacttagacttttttaggaataatttttaattttctatgcttttagggacttggttctgcgtacttctttgggaaaaagcgcctatattacaatgttccagccttctatgccccaacatgatgaggtcactcaaagcgggttctcataaaatgaataaactggcggatctcccgggtaaggaatacgtcccgccgccataccaccgcgatgttcagcggcaacggcgggtccaccggcagggctatgatattctccccgggctcgatcacttggggtaataaaaaggcccctgccagattctgccggacaaaactcttgatggtcagcagttggttggaatagaacaacacattaggcgtcagtcctgcgtctcggaaacgggtctgcagcagggtctggtgataatatccgctggtaaataggattaaaggtgccattgcaatttccctcaactccgccttctctcgcccggccatgggggtgccgtagccggtgcagtacatcatggacatccgcatcagtggatgagcggccagtgcagcgggtggcgtttctcccacggcgatgatcgccagatctagctgaccggcgcgcaccatatcccgtgctgtatcagatcctgcttctgtcagccgaatgtgtacttccggacaacttccggtgaactccgcaaaaatcttggggaatagaaaaaaggccaccataggcggcactcccacggaaagagtgctccggcgctggctccgggcctgaaaatccgctgttaggccctccacttctgtcaggatgccatcgcagcgggccaaaaacgcctcaccatccagtgtgggaaccaacgtccgaccaccccgactcagcaatagcagccccagttcatcttccaagttctgaatagccgcggtaattgccggctgggaaacgtggagtcgctccgccgcccgggtaaccccacccaagtggcaaacggcggaaaagtagcgcagctgcatcagtttcatcccatggtgcctcccctttttaatatcgaaaaaaacgatatttaaataaatattatatattatatttaccatagaaacatctcttcggattgtttactgctaagtgctgttatttcaatggtttaagcagtagtaagatgtggttgaaagagtagaaatgtaggtaagtcatatattattcctacattatttctacatcgacattcctacacagaatacaccctattttattttttcgatttcttccttaagccagtcgaattctcgctgggtgtagaccttttcggtgatgtcggatatcttgtgaccaaccatgtatttgattgcatattcatcaacgccagcactctttgcggccgtgacaaagtgctttcttccgtcgtgaggacgatgctccgggttaagattaagctcgtcacggatcatctcaaagccggccttatagcgttggtagctcatcatcacagtcttgccgctgcgcttgtctttacagttgaagagatatgggctgccgatttctttggctttattgtaatgtcgctccacgaggtagcgaatttttgagtggataggtacgacgcggtcttcaccagcttcggtcttgatgccgcctttgaaagtgccattctcaaggtctacattggcaagctcaattaggccgagctcttgtggacgccatccagaataacactgaatgagtatcacatcaacgaaattcttatcgtcgacatgttcccagagctttgatatttcttcgtccgtaaaaggtatgtgctctttcttgactttctggatctctttgatcgtttcgtcagtcagcttgaatgtgcgcgagtagtttctgtcgacgatctcatattccagagcatagtcaagcatcaggttgaacaatgacttgatcttgttcttcatggatgcgctggcgtgttgctctttccctctgacagtggcaacaccctcgtccatgcagcctttcacatggcgggcacggacatccattactcgcatatcgtagacagccgagcaatacttccaagctgaagtaacggctcgtgaactgccatccgatttgagcgtcttgaaatactcttccgaccacttgtcgtaaagctctttgactgtgatcgcggcgccgaggtcgtaagggttcttgttatattctacgagcgctgcatacgcgtcattgtaagtcgcgaaatatgagtcaggcttgagcggtttgcaaattggcttgccgtcctgagtctttccaaccgtaaccatcgcccgaaagggattccgaaggttgcggttttttatttcgctgatttggccaaacccgttcgggaggcgtcttcgtttattgtttttggctctcggttttcgctttacagacggcttcattggatagccgcaatgagggcaagccggagccttgtcgcttacctgcaattcgcattcagggcattttacaagcatgagtttcacctccatagttgatttgtcctttgtaatcatatattatggtgtaggagttgtcaagatattcctacactttattttttgatggagcgatgcatatgattacaaatgatgtatcaacctgccccaaatgcggcggcgatttgaaatactatgaccgtgttactcggattgtacggacgaaagaaagaaagacctggaagatcccaatgcggcggcttcaatgcactcgctgcggttccgtacatagagagcttcctgaactgatatttccgtacaaacagtacgaggctgaagttatcatcggtgttttggagggcttcatcacctgcgaaaccatcggatttgaggactatccctgcgaaatgacgatggtccgatggcaagctcaggactggaccaccgaggttgttttaacaaagcgcagttgctaacttagaatagccgttgaaaggaggtaaacgccaatgaacgagcaagagttccctcaggggtctgtccccgtggctgttgcggcccgtgtgtatggcaaagatgcttcatgggtccgcgccggcatcgtctcagggtggctcccgattggcaaagccactcgcagcggaaaattagtcaccaccatcgaggagatggattcacgctatggccgtatcaacttttacatctccccaaagcgtctctacgaggagacaggatttttgtggaaaggagaacgacaataatggcaacggaaatccgtccggagctgtctgagaaaaatccgtactggattggcaagcaccggtattacgaactgaagcatttctgcctccagtatccgatttggaagaaagcctataatgctctgcttggcctaagcagccgtccgaacgaccttgatattttcgtcaagagtggccaagtacggagcgatccaactgcaaggtgtgcggaatctcgcgtatcctttgccaaacggatggaactggtcgagcaagctgccattggtacggacggtgacctctatccttatattttgcgaggggtcacagagggtctatcctacaatgccttgaaaatgcagtatgccatcccctgttgccgcgaggtctactacaacttgtatcggcggttcttctggctgctgagtaaggagcgtgattgagatgcggattgtgaatgtggcggtcagacaatgctatcgcttcaactgcccgaattgcgggagcaagctggaagctgacagtgacgagctggtcgatgtcggtggaaagaccagtcggttctggtgtcctgtctgccgagaagaaagatacattccatggtcttctctgagaaaacggacggtctacgaggacagttccgcagattaagcaaacccctttatggaaaggagtgtttttctatggacactatgtttgaaaatttagattttcggtttgataaggaaaataacgacgaacgaccttttatgattgcttgtaaagatcgagaaatcatggatggggaacgttgggtgttggtatctttatcgaccgatgaagcaaaaagattactcaagtatcttgaagaacacattgtaaaataaagaagattgagccgcttacaacggctctttctttttatattttccggcacgcgggtaactggatcagatgctaaattggtatctggaaaattgcccggggtaaaaatctgaaaaatcattttggaggtatgacatggaactcatcattggcattgttgtcggcattatcatcgggcttgtagtcggaacgcttatatttcggcgaaggtacattcccgtcggcgatcttcggatcgaccgttctgacccgacgagcgaaccatttctgtttctcgaattaggcacagatgtgcgcactatttctggcatgaaaaccgtcacgctcagcgttcgcaacgagaatttcctcccgcatgaataacaccccctattatggagccaacttattgaaaggagaaatgcaatatggcagaaatcaagaaattgctggatgatgcaatcgaaaccgagatcaataatctcaactcggcatctaacaaagacgagaaatcggaggccatcaagaacctcgcagcactgcacaagctccgtatcgaagagatcaaaacggaaactgaaatcgaggaaaagtcggagcgtcgggccatggataaagcagcccatgacgaagacgcgacactgaaagcgtttcagcttgacgagaatactctcgatcggtacgcgaagattggcattgctgcggcggaacttgtattgccgctgatgttctacggcgtttggatgagtagaggactgagattcgaggaaacggggacatttacatcccagacattcaagaatctgttcaatcgcttcaagcctactcgaaagagttgagccaacagcgttgagagtcgtgtaaaaaacacgctctcttcgcttttttcgtagattttgcagggcgctttatggaaaggagataccgaagagctctttatatctctcgacttaataccgggggtactgtataatagcagctacttccagattaacaggaggtaatgaaagtgcgcagaaaaggtagaaaggttattaaaccggcaggtagtgaattgatggactacctgaataagggatacgccatctgcaacaagtgcggagcggtgatggatcggaaagaagatcctgaaggcggatgcggtatttatgcctgcccgtcctgtggatgggaaattgaggaattggattatgagtacgagagttcagacgaaatggaactcggactcgatgaaagaggcgacgagtatctgatcttcagggatgacatgccgcccgcaggttgtaaagcttgcggtggtccctacccttactgcaaagcgtcatgcaaaatgtttgacgactaaagcattatcaacggaggagggtcctgtaacaggggctttcctctttttgttttggagatggagatgcgataccactatgaaaagcctacaatttatctttcaatgtacggaaagcgttacatttgcgaccatccggtctacgatagctgcacactgtttgaaatcggagataaaggtcttgctgtgatccaacagcggtatgatgccgaaacaaagtccacattctggacagaggtggatgcatggctgaccgatgccctctatgttcacccgaaattcaaggaattctttgatgaacgagccggaacttgtacggacgggctctggccaactgtaacgattcggcaaatcatgtgggcgctgaaaatgaagcctttgcaaaagcagcgttgggaaacggtctttgaccgccgtgatatttagcgccaatccagcagcccctattatggataccaatacctatgaaaggggttaggagtatggatgagatgaagattcaatcgaaattcatgacaggacttgtatcgaggatcgtaaagaaggtacttcggataaaattgggctgtgaagtagatattcagctcaatgagttccggacgacagtcattgacgataagactcatgtccatctggatttggatgcggaccttacaaaagaagaacttaacaaactattgaagactattggaatctgaggaattgagccgttttatgcggctcttttcttttttcgcagattttgcaactcatattatggagaaacagttagctcagtggtagagcgcttcacaaaaccagtgaagaggtgatcggttcgagtccgatactgcttctttactttttattttggacgaaaggagaaagcatgaacatcgagcaatttgaactgatcttgtgcgacatgtacaccatggatgcatggtcgcctccgcttctctggaaatggaaaaaagagttcaaggaggcaagtacaaagcagtgggcgatcagagagcttgagaactacattcgcaagcgactccatcatcgctccgatggatcggtcgacgaatttatcagattcacaaacgagttcgccatgaagatggctcgctattcaaatcactcaggagagaaccaagagatgcacgagatctttcaaactgccagttcggtcgctgctgatattttagatctcttaaatgcaatgaaatgaaaggagaattcagatgaaactcgaccctaagatcgggagaagcttgaagaaggcgtctcccaccattttgacatgcatcggagccgctggcgttgtggcaaccgcggttttggctgtcaaggcaaccccgaaagcggatagtcttatcaaggctgacagcaggagaaatcacgacggcgacccttatgctgcaacaaagctcgaagccgtcaaatcatgctggaaatgctacataccggctgcggccactggcgtcgctacgatcatctgcatctttggagcgaataccctcaataagaagcagcaggcgtctcttgccagtgcctatgcgctcgtaaaccgatcctattctgactataagcataaattgaaggaactgtatggcgaagatgcttacaagaagatcatggagtccatcgccgcagagaaaagcagtatgcctcctattacggctaccggaggcttctccaattcatctttggagtttgaagatgccaacgaggagcagcgactcttctacgacagcttctccaaaagatattttcaggcaaccataagccaagtcctgcaagcagagtatcacataaacaggaatatggttctcggcgcgttcgtaactctgaacgatttctatgacttccttggaataagccatgtcgaaggcggagatgttgttggctggttgctgtctgatagcatgtattggattgacttcgataactcaaaggctatggttgatgatggactgaacggagagattccgtgttatgtcgtcgatgctgagttcggccctcaaccagaatctgcgtgggattattgatttcccgcaaaaactacatcgcctattatggaaaggaggtcatgctttatgaaccagagaaatatctttaagctgctgtcccttgcgggagtcgtccttggcgggatcggaacattgttatccggctgggccgacaacaaggagcaggaagcaattatcgaggagaaggtcaacgaagcacttgctgccagaaacgaagaggaagagtcctaaacagggctcttctcttttttcgaggtgaactcatgacaaatgatgcggctgtacaagcacttctcgactatctcaacgaatcagatgaacccgaaatctattggccacgccatcactttgaagaatcttgcttttcgagatgggcggcatgggagatgatcgaggcaattatggatcatcctatggaagatccggaagatgtgatcgaggagttcaccatgaaaatggtgattttctcatctatcgcagatggtacggatgaaggactgatattttcgattgccgctgatttcgccgatgaatgcttgacactatttagagaggagaactcaaatgacaaaacaaaccattatcaatgcgttgaaaaacgcccagaagtcaataaaaaagcacagccctgagatcctcaccggcatcggaattgccgggatgatcgccaccactgtatccgccgttcgagcaacgccaaaggctttgcagctcatcgacgccagagaaatcaaggaaaaccggcgtctgagcaacaaggagatcgttgccaccacatggaagtgctatgttccggctgctgttacaggtgtgctgtccacagcctgccttgtaggcgccagctctgcaaatcttcgacgcaacactgcccttgcaacggcttattccatctccgaaacggctctcaaggagtacaaagagaaggctgttgaggtagtcggtgagaaaaaagagcaggcgatccgtgatgcagttgccaaggagacgcttacgaagcaccctcttggcgaacgcgaggtcatcattaccggcggtggtgatattctctgtttcgacccccttacaaaccgatatttcaagtccgatcgcgaccgcctgatgcgtgctatgaatgagctgaacaaacgaatgcgcgacgagatgcgtgtttcgctgaatgatttctacgatgagatcggtctgagcgaggccgaggtcggagagcatcttgggtgggacattgacaacggaaaaggctacatagacctcgatttcagcacacagttggctgatgatggaacgccttgccttgtcgtcggtcacaaccacccgcctatttacctttggtaagcgcagattttgcatctcctattatggagaaccaaacaacaaaaattacttttgaaaaggagaattttactatggaagacaagaaaatgaacgagatcgaggaaatcgaagctacggaagtcgacgagactcaggacagctctaatgctggtgccctgctcgccggtgtcatcggaggtttcattgcttacgctgtgattggcggggcgaagaagctgcgggtgatcatcgaagagaaggtcgctgcgaagaagctggcggaagccgctaagaccgacaaggccgaaatcgactcggcagacgaggattccgaggaaaactaagaaaagtaaattgcggagttctacaagggagagtgccaataacagggcgctttccctttttctttttatcaaattttggaggtgcactaatgcctgaatatcctgataactcgcatagcgcgagagaaaacacaagccctccctccaaacgggtggagaaagttgtcaacggcacagcaaagacccgcaagcagagcgaggtcaagaaatttgccggcatattcatgcctgatgaagttggcgatgttaaaaccttcatcatcacggatgtcgttatccctggtttgaagaacgccatcgccgatgttgtcagcattgttctctttggcgaagccggccgcatcggcactcggaagaacgccggatcaaaggtatcgtatcagcggtattatgacgatcctcgcagagatgaccgcagaaactacaatcagcggccgagacctgttgccgggtttgaatttgatgacatcatcttcgacaaccgtggagatgcagacctcgtcctcgaccagttggaatccgctattgccaactatggcatggccagcgtgctggatctctatgaccttgccggacttacttgccagaattacatggctgataagtacggctggactgatattcagagtgccagagttgcccgaacgagggacggctacatcttgcagcttcccagagcaatccaaatcacctaaaaagaggtgcagtcatgtacggatattttgtctcaagcgggtacagaggcttcgtcgacggaacatggatgctgttcccgactgagtccgagtattacgaatacatgaaagagctcaaaaactgagctgaaaactacaattaagaaaggatttattaccatgaaagctaatgaaatcatgacttccgcaaagcgtaccttctccaaggtcggctttgggctccagaagaagagccccgaaattcttgtcggtgtcggcatcgtaggtgctgttgcaagtgccgttctggcctgcaaggctaccactaaggcaggtgccatcgtcgaggagtctaagaactctctcgctgatattcgtgaggccaatgaaaacggcgtcaccaaggctggtgagtcctactccgcagaggatcgcaggaaagatctcgccatcgcctatgttcagacaggcgtgaagttcgcaaagctgtatgcccccgcggtcatgctcggtgcagtttctatcgccagcattctcgcaagccacaacatcatgaagaagcgcaacatcgctctggcggctgcttacgctgctgtcgataagtctttcaaggattatcgtgaccgcgtaatcgagcgtttcggcgaacaggttgaaaaggagctgcgctacaacatcaaggcgcaggagatcgaagagaccgttacggacgacaagggcaaggaaaagaaggtcaagcagaatgtgaatgtcgcagacgagaactgggatggctctgactacggcccttacgcaaaagtgtttgatgatacccactccgattggaagcaggaccctgaaatgaacctcttctatctgcgtgctcgtcaggctcaggcgaatgatatgctcaagtcccagggtcacctcttcctgaacgaagtttatgatatgctcggtttcaagcgcaccaaagccggcgctgttgtcggttggatctatgacgacaagaagccttacggcgacaactttgttgatttcggtatgaccgagattcgtcgtcacgatgctgattcggacgagtacaagcgcgcgttcattctggacttcaatgttgtcggcgacatcacttccaagatcgtcgaccaccagaatgactatctcgcatgaggacaagccgatgaaaaaattgcttatctgccttctcatcttcgtcggggcgattttcatatcctgtaactttgtgataaatgcaacgacgaccaaaacggttccggaacagcctatgattcagacggaacctctctctctgatcgtcgagacacctgctccatccactgatattttaccagaggaagagcctgcacccactcccgaacaagagcctttggctacgagggaggagatcgagcttcttgctctctgcgctatggcggaagccgagggagaatgcgagcagggccagcgactggtcattgacagcgttctcaatcgtgtagatgatccgcatttcccggacacgatctctgaggtcatctggcagaaaaaccagtatgcaggtatgtacggcgaccgtatcacccgctgctatgttatggacgagctggtaaagctcgttgaagaagaacttgaaaatcgtactgactacgatgtcgtgttcttcaatgcgggccattatagcgactatggagttcctatgttccaggtcggaaaccattacttctcaagctatgattaaaaggaggaacaattatgaagaagatcatgctttccctgctctcttataccctggcgactatgtccggcctctgcctggtgggcggagcagcagtcctcagctacaaggagtgactgacatggagggaattgcgaatttcatttccatgctcgactatgttcttgacacaaagcgtaagcgtcacatcaccggaggattgctgttgagtggcgctttactctttggcggtctggctatgaccgtcatgagcatccgagatgacgaggaggacgaagatgagtaaagcatctaccggctttgcctttgtggcaggccttactatcggcgcagcaggcgcctggtactatctgaaggataagtacgcaaaactcgccgaggaagagattgcctcggtcaaagcagcatacaccaagcgtgagaaaccgacaacggaagaaaaaactgtctcgcttgtaaatgctgccaagaacatggataagggtagcattaccgagtacactcagcgtttgcaggaggctggttataaggactactccagaacgattgacgagaagccctcgggaacgcctggtgaagttccgtatgtcatctctcctgatgaattcggagaacttgaagactatacgaaagttagcctgacatacttcgctgatggcatcttggctgatgagtgcggtgaaatcgttgatgatgtggaggaaatcatcggcgatgggctggaccacttcggcgaatacgaagacgattcggtgttcgtaaggagtgatgcaaagcgctgtgactacgagattctcaaggatctgcgtgatttcagcgacttcaagaagaaaaactttcctccgaataatgacgaggaggtctgaccttgaccaaaaacgagcttaatgatccatatttcgagtggatgtaccggctcgtggtcgacgaccgatattctaataagtcctaccggcgactgttctacaagctccacgacacggagtttgcatacacaatcccgatggacggcaaccgggccgaggatggcatcgagcttaggtatcggttcggtcgcgagcaaggctatcgtgatgctgtaattgccaactgccttgatattcggccttgcagcatccttgaaatgatgatcgcccttgccattcgatgtgaagaacacatcatggaagaccctgatattggcaaccgcaccggacagtggttctggagtatgcttgtcagtttgggccttggttccatgagcgatgttcggtttgatcctgttcgggtcgacgagattctcgaccgttttatggatcatgactacgcaccggatggtaagggcggtctgttcacaatccgtaaccctcggtttgatatgcggtctatggaaatctggtatcagatgaattgctatcttaacgagatcatcagagaagggagtttaacatgaatacgatcacgcatgatattttcgtgacggtcatgccgtctaagaatttctgcaagcagatgcagcggcaggctcgcagcacgaagatgttcaagttgattgcggtaggggcgatggttcttgccgcagcaaccgaggtggagcgcaggaagctggaggagcaggtctatcagctctctgttcgagtaaagaagttggagcgcagcgaaggagagtaatcaatgttagacttcttggtgattgcaacgcgcagtggcaagcgtggtatcatcgagatctatcccaagtttatcatcaagaaaagcagcgacctcatgattagaggcggcgatttctacgctatctggattgaggaacggggattgtggtcgactgatgaacaggatgcggttgacctgatcgaccgcgaactggaccgatacgccgaggaaaactgtaagcgttttgatgacaattatcgagtcatgcacatgtgggacgcggaaaccggaatgatcgacacctggcacaaatactgccagaagcagatgaaggaccagttccatatgctcgacgagaaactgatattttcaaacagcaaaacgggaaaaaagactatgccagcaagatgctgaattatccgcttgagcagggtgaggcgaactcttatgacaagctcatgagtgttctgtactctcctgccgagcggcacaaaatcgaatgggccattggttcagtcgtgtccggtgactccaagaggctgcaaaagttcatggtgctttacggcgccgctggtactggtaagtccacggtgctcaacatcattcagcagctctttgatggttattactctgtattcgatgctaaggctctcggctcttcaagcaatgcatttgcgctggaggcgttcaagacgaacccgttggttgctattcaacatgatggtgacctgtcccgtattgaggataatacgagacttaacagccttgtttcgcatgagctaatgacggtcaacgagaagttcaaatcaacttacgccaaccgttttaaggctttcctctttatgggcacaaacaaaccggttcgtattacggacgctaaatccggtctgattcgacgtttgattgatgtttccccaacaggagataaggtcgagccgaacgagtacaagaccatcatgaagcacatcccgtttgaacttggcccgattgcttaccactgtcaagaggtctatctggaagatccagcttactatgacggttatattccgattgctatgttgggggcctccaatgacttctacaactacatcgttgattcctacccagtcttcaagcgtgaagacggaacgtccctcaaggctgcttgggagatgtataagacctataatgaggaagcaaaggtctcgtaccccctcagccaacgagcgttcaaggaagagttgaagaactatttccatgactacacagagcgcttcagtatggaagatggcactcgtgttcggagctattacagtggcttcagaactgaaaaatttgaggaacagaccatcattgataagccggagcccacaactcggctgattcagtttgatggaacagtatccgcattcgacaaagattgtgcggactgtcctgctcaatatgccacatctaaagaaacgccctcgcagaaatggaaaaaagtcacgaagactctttcgcagttggatacctctaagctccactatgtcaaggtgcctgagaaccatatcgtcatcgactttgatattccggacgagaacggcaataagtgctttgacctgaacctggcagaggcgagtaagtggcctccaacctatgccgaggtcagcaagggtggtcagggtatccatctacattatatttacaccggcgatccgacaaggctgagccgtatctatgacgaccatattgaggtgaaggtcttcactggaaaaagctcgctgcgccggaaactcactaagttcaacaacctacctattgcaaccataagctctgggttaccattgaaaggagaaagcagcatggtaaacaacaaggtggttcagagcgagaaagggcttagggttcaaatcaagagaaatctcaacaaggagatccaccctgcaactaagcccagtatcgactttatccacaagattctgacggatgcgtatgaaagcggcatggtttacgatgttaccgatatgcgcaatgccgtcctggcctttgccgccaacagcaccaatcaggcagagtattgcatcaagctcgttaacaagatgccgttcaaatctgccgatgccgcccctgcggccaagaacgaaaccgctgacctcgtcttttatgatgtcgaggtgtttccgaaccttttcctcgtgaactggaagtttgcaggaagcacacaacctgtggttcggatgatcaacccgacctctgaagacatcgagggcctgatgaagttccgactcatcggcttcaactgccggcggtatgataaccacattctttatgctcgcttgatgggctataccaatgagcagctttacaacctgtctcagcggatcatcggcagcgaaaagaaatccaagagcaacaactgcttctttggcgaagcctataatgtctcttacactgatgtttacgacttctgctcgaaaaaacagagcttgaagaagtgggagattgaactcggcatccaccatcaggagcttggccttccgtgggaccagcctgttccggagagcatgtggcagaaggttgccgagtattgtgacaatgatgtcattgctacggaggcagtattcaatgcccgtaaggctgacttcatagctcgtgagatcctggccgatgtggctggaatgaccgtcaacgataccacgaacactttgaccgccaagattatcttcggtggaaacaagaagccgcaggatcagttcaattaccgtgacatgggtgatgccagtcagatttgcagcatggacgatctgccgttcaagtttgggccggaagaatatgacaactatacggcgtttgacaagaaagaccgtccgatcttccctggttacaagttcgataaaggcaagtctacttatcgcggcgaagaagttggcgagggcggctatgtctatgccgagcctggtatgtacggaaatatcgctctgctggatattgcttctatgcatccctcaagcatcatcgcagaagatctcttcggaccggtctatacgaagcggtttcgtgagatccgtgatgctcgtgtcgccattaagcataaggagttcgacaaggctcgtaagatgctgaacggtgctctggcaaagtatctgacggacgagagtgccgccgatgctctggcacaggcgctaaaaatcgccatcaactccgtttacggcctgacttcggccagcttcgagaatccgttccatgacaaccgtaacaaagataatatcgtcgccaagcgcggagccctgtttatgatcaacctcaagcacgaggttcagaaacggggctttgttgttgctcacatcaagacggactctatcaagatcccagacgctacacctgaaatcattcagttcgtcatggactacggcaagatgtacggttatattttcgagcacgaagcgacttatgatcgcatgtgcctcgtcaacaatgccgtttatattgccaagtacaaggatggtaaacacgccggcgagtggacagccacgggcactcagttccagatcccatatgtcttcaagaagctcttctcgcatgaggagatcaccttcgaggatatgtgtgagacgaagtccgttacctctgctatttatattgacagaagccctgatgaagccgcggcctatatcaacaatccggacatggcaatacagtccgaggataaccttgtacttgataatggtcatactttgcagttcatcggaaaggtcggactgtttaccccgattaagtccggttgtggtggaggttcactcgttcgtcaaaacaccgataagaacggcaatgtcaagtacgattccgtcgtcggaacaaaagactatctatggatggaatctgagatggtcaaaattctcggaaaggaagactgcattgaccggagatactatgatgctctcgttgatgctgcggccaccgatatttccaagtatggcgatttcgagtggttcgtttctgaagacccgtatgtttctgacacgccgccttggttcagccccggcgaaccccatgaagaagacagtacaccgttcgatgtgaggtaattctatggagaaaaacttcacaaaagatggtctccgctggtttacttgcaggcgatgtggactgagaaactgcgagaacatttatcggtggaaaaagaagccgcagcctatgaaaaacatctgcacccactgcattgaaaaagaggaactgacacacaaggaagctcgtgaacgagcccattatagtccattccaatatccgttttaacagttgagaggagtcttaattatgagtcgtaaagctactgacaacatcatcatcgaaaacgcccgcattatcttccggaacttttccggtaaggaggacaagtacaaccgtgccggtgatcgaaatttctgcgttatcatcgaggaccacaacgatgctcagcgtctgatcgaagacggctggaatatccgcgtgatgcctccccgtgaggaaggtgacgagcctcgccactatctccaggtcgcggtgagcttcaagaacttcccgcccaaggtcgtcatggtcacccgccgcaagcagacgcctctcgatgaggagtccatcggcgcgctcgactttgccgagatcagcaatgtggatcttatcatccgcccctataactggatcattcaggagggcaccaagaacgagaagagcggtgtgaaggcctacctcaagacgatgtatgtcaccattgaggaggatgagttcgccgagaagtatgctgcgagcgagtatccgcaggaataagcattgcggggacgctggttaggaggtagccggcgtccctttaactttttgaaaggaggaccccatgcctttctggaaacctaagaaaaagaagaaagcggttcataaggcgaaaccggctaagtcgctcccaaagtatgagccaaagccgttcattccgcctgagataccgaaaattgatatttcagcaaatcagcaaaaagagccacaaaagccggctccgaaaaaagcttcctcgccaagggcggacgacaagaagtatttcatcgagacattcaacaagctcgtgtccgagcgaaatcgaccgtgggacatttggaaggacttcgttctgatgacggcctgcgcattctccaatgctgttgataagacacattatgatgagcgagaagaccgttatctgaaagccatcgccaagtaccgcaaagaagagcaggcgttattcccggagcttcttgccgaaatgacggtcgcgttggagaaaaatccggaccaggactttcttggtgaagtctatatgcggatgaggctcggaagcgacgaacttaagcagatatttactccttataatgtttgtcacttcatggcgcttgcgacaatgggtaatgttgcggaacaggtcgaaaaaagcggctttatcaccgttcacgatgattgctgcggaggtggtgcaactttgatagctgctgccaatgtagcacggaacgaccttgaaaaggccggctttaacttccagaaccatattctcttctcggctcaggacatcgaggagacagtcgcgctcatgtgctatattcagttatcgctcctcggcgtcgccgggttcgtcaaggtcggcaattctcttaccgatccgatcagaaatggtgactctttggagaactactggtttacgcccatgtattttagcgatgtttggcatactcgtcgagttgtcagtcaaatgatggatattttgcgagaggaacgtgaaagcgatgaccattaaagattttgacacgaaaaaagtcattcttgaagaccaatacaaaagcgatgagtacgagacgatgactctctactttatcgcgccaaaagaatggctcgaaggcctctatcctgatgctgttcacactgaaatcagtgttgagtatccgctgaattgccccgaagcttatgcggcaaccgtaatggtatctccgacaagagatcttggagaggatggatatgaggactatgactggagtgaccttgagctgtctctttcagatattgaagcgttaatcgggatggctaagtcatgagtatcagtctgtacgatcatcagcgcagcgcccttgaaaaaatgaagaacggttgcattctatgcggcggggtcggttccggtaaatccagaactgctctcgcctattactatcttcagcagggcggaaacctcgatattcctgatgcgccgatgaaaaatccgcttgatatttacatcatcaccacggcacgcaagcgcgatacctgtgaatgggaggacgagttggctccattcctgctctccacccatgaggactgcaattactacaagaacaaggtcatcatcgactcgtggaacaacatcggcaaatacaaagatgtaaaaaacagtttctttatatttgacgagcagcgtgtcgtcggttacggagcttggacaaaagcattcctgaaaatcgcgaaagtgaacaaatggatcttgctctcagctacccctggggatacctggcaggattatatccccgtcttcatcgcaaatgggttctaccggaacaagaccgatttcatcgaccagcatgtggtttatgactggaggtcgaagtatccaaaggttgaccgatacctcaacaccggacggctgatccgtctgcgcaatcgcattctcgtgacgatggagttcgagcggcacaccacatcgcatcatcaggatgtgcctgtttcctacaacattccgctctacaaagatatttctcgaaaccgctggaacccttgggaagaccgtcctattgaaacggcttctgagctttgtatgaactggcgccgcgtggtaaattcggacgagtcccgaagcgtggccgtgctggagatcatggaagatcaccctaaagtcatcatcttctacaatttcgactacgagcttgatattctcaaaaatcttggttaccccgatgggactgaagtcgctgaatggaacggtcacaagcatcaagagatcccgaccggcgacaaatgggtttatctcgtgcagtacacggccggctgcgagggctggaactgcattaccactgatacgatcatcttctactcgcagaactattcctataaggtcatggttcaggcttccggacgaatcgaccgtctgacgacgccattcagtgacctttattacttccatctaaagagcttttccggcattgatctggcgatcagcaaggcactcaaggagaagaagaacttcaatgagggtcgctttgttgggtggtctactgcgccgatgccgaaagctgcatgacatgaaaaggagaaattatgaataacgcaaaaattattgctgtcgacttcgatggcactttggttgaaaacaaatggcctgagatcggtgcgccgattgaaaaaaacatcgccaaggttaaggccgaacaggaagctggcgccaaaatcattctttggacgaaccgcgtcggcgaacctttggaaaaagcactctcgttctgcaaggagcagggcatccacctcgatgctgtcaatgagaatctgcccgaaataacaaaagcatttgggactgactgccggaagatcttcgccaacgagtattgggatgatcgcgcagtcttgatgtccgagaaagatatcggagaattctctgacgggttccacactttcaattccctctatcatcagcggctcatcctcttcacggccttggtgaacactttcccgacgcttgcttggaaatcccacaagcattcggatggcgagactccctttggaggaggctggttcatcgttggcatcgacacgccaaaggggccctatacctatcattacgaggacaaggactgggacctgttccactgcaaagaggtggccactgcccctgagtgggacggccataccgataaggatgtcgagcgggtactgtcccttacggatgacgagagtgattgggcggctcgtgaagttgctattgcttctcagaaagaacgcgaaagtgccgaagataaagacgactgggattacggtgttgcgtgctatgagagtgccctcagagcgtatcggtctttggaacgcgacggccactccggtatgagcattcagatcaccaagagcatcctgaaccgcctcatcgacggcaaatgccttacccccattgaggacgatcctgatatttggactaaggtcgagtttggtgagaacgatcctatccagcacttccagtgcaagcgcatgagcagcctgtttaaggatgtcgccgaggacggtacggtcacttactcggatgtcaaccgtgttcagctcatcaacaaagaaagccctgatattccgttcagaaacggcttcggtactcgccttatcgacaagatgtatcccatcacgcttccgtacttccctgcggacaagaagttcaagatcatcgtcgaagagtttctgaccgatgagaaaaatggcgacttcgataccgtcggctatctccagcttattcttcccaatggcgaggtcgttgatctgaacggatatttcaaagatggtccggacggcatggttcgcatcgagcatgctgagtacgaggagcggaaagccaacaggatcgacaaaaagtaaccactgatatttgaaaggagaaagaaatatgatccccattgatacaatagtcagcattaaatccggtgacgagtacggtggtaaatacaccgggaaactcggcatcattaaaaagtttacagatgatcgggtcggagtggagtttgccggccttaaaaaccatgcaagcaaatacggcctcttctggttcaagaaagagaatgtgacaccttcactctttgatgtgccgaagcgcaatgatgcaatcattccggcggctcttgctaaggctttcctcaacttcactttcggagcccccagggcatcgctcggcgtaaagcaggtcattttcagtggtcctaaaacgatcgtgttctggctcgacggaaccaagactatcgtttcttgtggcgagggtgaccacaatgatccctatgccgggttctgtgctgccgttacgaagcgagtctttggctccacttctcaggcaaagaaggtcttggcacggacgaggaaggagacttccaaatgagcacaatttatatcggcgaacggcaaagtggcaaaacaaccatgctcatcgaaatgtctgaaaagaccggcgccaccatcgttgtggctacctatccgatggccaagtacattcagttgctcgctgctcagatgggtaagaaaattcctgttcctatcacggtgacgaactacatccgtcttctcgcaagtggcggccttggtaagagcgagaagtatctcatagacgagcttcagatgatgctctctgctatgaatgtcgaagctgctacggttgactgcgactgcattgaagttcttcgcggccaacagaaagaaggtttgtaatggctggaattaaaatgaatgttgagtttccgacgcgcctttgcgaagtcaatggtaagctcggatattttcaccgttgggagcagtggagcaaggttgtcgacgcaagccctcttcgtggaggtcatcctggcggacaaaacgggcaggtttttggaattgttgaattcgaagacggcgttcgtcgtgttggtccgtcttctatcaaattctgtgatgaggagaacgcgatactttgtgagatggcaaagcaccatgaggcattaaggaaaggagaagcaaatgctgaagattgaaaacgccgaagttctcggttgggaacacgccattcgaggcatgaggaaccctaagaactcatgggagaagagtgatagcggcccagaatgtccttatgggaaagaaaaatgttgcggagaatgccagcaaaatttctgcattggccccaacgataagcaactcatgatggccctccgcaacgctggtacggatcatcgcaagttcatgcggatgattaccgtctatctcgacatcaccgccccgctgtactggtggaaagagttcgacacctataaggtcggtacggtcgccaactcctgctctacgatgcacaaaatcgcagcaaaggagtttacactggatgacttcagtcacgagcatctggttgatgacctcgatgtccgtattgaaatcggaggaaccgatcacagagatacggggcccatggaagtccttggcatgacgattgatgtgctaaatcactatcgcgaaaaatatcttgcagcgacgaagactgaggaatacaccggcctccccgccaaggatatttggtggcagatgatccagcttctccccagttcctacaaccagaagcggacggtcatgctgaactatgaggttctggccaatatctacaaatcccgtcggcatcacaagctcgatgaatggcatacactttgtgaccggattgaaagtctgccttattctgcgttgattactggcactgccatttgacacaactccggctgttatgatacaatcataaaaaaagaaatcatgcgcaaaaagtacatcgcctattatggaaggaggttgttaggctatggctgaacgcaacgattctcaccttctggatggtggtgattctgtgggtatgacagataaccagtacaagggtatgctgcttgaccagttagaagactggcaggaaatccttgacctggcaatcgcagccgggaacaccgagattcagaaaaaggctgagaagcaaatcgcgaagatcaacgaaaagctgaaattctaatctctacccagagggaagggcttgtggaaacacaggctcttctctttttatattctttttgaggaggaagtttaattatgtcttgtcaatacaaagaccagtgtccaagctacagtggctggtgtaacgggccgaagcaggatttctccaagtgcgtggagttccttgtcacggcctatgagaacgagaaaaagcggatgatgcccaacgagtaccagaagctggctatacggacatgcagcatcccctacgaccagaagaaggatatgctcatgcacgctgtcctgggcctgacttccgaggctggcgaggtttctggtctgttccagaagaagtaccagggtcacaagctcgaccctgagcatctggaaaaggagttgggcgactgcctctggatgattgcggaggcttgcaccgctctcggctggaacatggaaacggtcatgcagaccaacatcgagaagctccgggcccgatatccggagggcttcgatgccgagcacagtctgcatcgcagagcaaatgatatttgaaaggagcttgtgaaaatggatgagaaaaaaatccactcaatcattgatgaagcaatggcggctcgtgaccgctctgtgtccatttatatttcgcctgatggtggtgtttctgtttcggtcttcccgtggccggacgaggagatactccgcaacatgagagccagcggtctgatctctcacaatgactaccggacacgacttggcctgtcgcctatgaaggactaaggaggatcacaatgaacgaaaaagttctaagacataaggaaatctgcgatgggctgaacgagctctacgcacgcaaaaaccacgactatggcgacagcttccataccactttcgtcgaggaaggtctcgctatggcccgtatccgtctgggagataagttctcccgcttcaagaccctgtctcgcctttcctgcaatgaccgcgaccagcagcaagttacggatgagtccattcgtgatacgctgctcgatctcgcaaactatgccatcatgactgtgttggagatggatgcaccagatgagagtcatgcgactatgtacgcttatgacaagccgttctatactgttggggaggataagtaagatgaaagctaagagagcgctttgtatgcttgcggcgatcctcctcgttgtcgccatgatgctgatgttcctgacgggttgtaatagacaagtaatcgacacgacattcagctatgacaatgctatcctggctcttcccgatggttctgtcattagcgggaaaatcgagagctggaaagactatgatgacggcgatcagattcaggtaaaaattgacggaactacatatctggttcattccgtcaacatcgtactgataaaggagtaatgattatgtggaagcgcgaactgatccgcaacaagatctatgcggtattgatggtgctggcatctttgccggttgttattttggagagggatggtacggtccttctcctttctcttttcttcggagttccgatgttcttcgcaaaagaaaactggatcatgggaggacccgttcatgaaagtaaagaaagccggaaaaagagtgttcggagccgtaatgtccgctgccgagaaaaaggctatggacatggagatacagcgacagctcgcagagtacgatcgaaagcatatccgagagatcgacgctctggttctgtgggagctacgtgaacagctcggcttcggcaacaagaggcttaaaaaattctatgacaacttctcccgcggcatcgaggctttgatccgtcgttatgagatggagcagggcgacgatgtctggctctgtacctacaagctgaaagagatcggctgtgatcttgaaaagtgggagaaagaaagaggtgaccaatgagcgaccgaaaaaactcggagggctactcagatccgacagcctaccaggccatgatgaaccttgaaatcgaggagcttcgctttaagaagttgctcaggtctatcaaggatgtgtgtgacttggcggacttcgagatcgaaggtcgtgtcgttctgatcgacaagcggtccggacggatatggaggtagaaaaatgtttaactttcctactgaagatattgtgaaggcattcgaggcctttagcgaagccatcaatcagttggctgctgatattgttgatgcgtgggaagctgtcaccgtgactgtatcagccgtcctcgacgatgatgcgctctggccaaaccgatacggaatgccgcctaaaaagtacggtcaatctcttcagaaacactccaaaaagtcattcaatcaatatgactacatcccgattatggcaaaaaatctcccttatcagcggagagcattttagcaaaactgcgtgaatttgccccggttctgtctaatctaagatagaattcggggctctttcatgcgcaaaaatcgtggccacttttattttgaaaaacgggcttctgcccactttctttcagaaacttgatatatttgggcgggttgagagacttgtagagacggttctggccaaaaaaagtgggtttttgcccggttttatttgaaaagtgggcaggctgaaaccgttggtacacaaggctttgcgggctttctgcccactttcccacttttttctttaattagtgtgaagaaaaaatataaaaaaaatatataagtgacgagaaaaagtgggtttttggccaaagcctgattttcctcaaaaaactctgacttccttttcgtgcgcgagtgtgatatactaagcttgcgacacaattaaatcttcttatccgcttcactatgggagaattacttggcaacaagtgtttctctcttaactcgttatacccatagtggtggtaagaggattgtgtcgcagcaatgagagatgcgcttttgcagggtgcgtctcttcgttggggcgcaccttttttatttgcactcttacgaggggaggacggagcgtggcacggccttacactgaacagcaagttctcaagaaactggatattccagatttcagacatttgacaaaagaaaaagtcattgcttttgcgacaatggttccgaagatgaaccccgaagttgcaaagaaagctcttgagcaatttccgaacttcgcttcgacttcacttgatgttttgaaagagtaccgcagcgtcatccaggaagcgatggaagacgatcgagagagtatgcgcagttgttacgatatgtataaccgcgtgatggattctcttgaaaaaatgctggataacgacgacctgacatttgagcagaagacttatattctcgatcagatgcaggaagttgccgcggcggtagcggataaggactctgaaaaatcgaggaaccgtttgaagctcattggggttatcggcggcgtagctgctgccattgtcgcggctttggcttcgagtcttggaggtaacatcgcactgaaagaaagcaacaacattgatgatgacaacataacggatttatgagaaaggacagacagcatgagtaaaggtaacggaaagcgtagcactggtggactgatcctcgatgtgatacttactttctgcacaggaggtctgtggctgatttggatactcattcggtatctgcgaaataatagctgaccctctggatatttaaccgagacgcttgaaaaggtgtctcggctttttttatgccctttttggcttccgcagaaaaaacagggtcttttatggagaagagagagatgtgttacacatttccctctctccattttattttttgtcgaaaggaggtcatttcgtggccagaagttccagacttgagagcggatttcaagaccgtttaatcgagtcattgaaagcgttgttccctggatgcatggttttcaagatggaccaaattcagggacttcccgatctgttgattctttatggcgagaagtgggcctccctcgaatgcaagaggtctgcgacagctaagaagcgcccaaatcaggactactatgtcgagaagatgaacgatatgtcattctctcgctttgtgtgtccggaaaataaagaggaggtattgaatgaacttcaacaggcattccaaccttgaaggtcagcacgccttccttggtgcaagtaagtatcactggatcaattacaccgatgataaaatcgcggactcctatgtgagatttctggcaacacagaaaggaactgttcttcacgcattcgccgctcagtgtattcttttggggcagaaacttcccaagtctcagaagactctgaacatgtatgtgaatgacgctatcggttataagatgacgccggaacagatcctctactattccccgaactgtttcggaacgaccgatgcgatttgtttccgaaataattttcttcgcatccatgatttgaagaccggagaaattgatgctcacattgaacagttggaggtctatgccgctctgttctgtttggagtatcatattcgtccagccgacattgaaatggaactgcgtatctaccagcacgaccaaattctgtaccataagccgactgttgaggatattctgccaatcatggacaggatcatcacagccgataaggtcatcaacaaaattagagaagaggagggttaagctatggacctcgtagaggaagatattctgatgcactatggcgtcaaacggcgctctgggcgctatccgtggggttccggtgataacccttaccaacatggcggcgactttcttgctcgcgttgaagagcttcagcggctcggcaaaactgaaaaacagattgctgatgaacttcatctttcgacgactgacttgcggatgcaggttcgcgtcgcaaagcatgaacgccgtgctcttcaggcagaccgtgcccgttctttgcgggaagacggtaagacgctggatgagatcgcctcaatcctcggttatgcgaatgactcttctgttcgcgcactgctgaatgagaatacggcagccaataagaataaggcgcaagccacggcagagattctgaagaaagagcttgcggaaaaaggagccattgatgtaggcaccggcgttgagcggcagcttggcgtttctaccggtgttcttcaagaggctcttttcattttggaaaccgagggttataaccgctatggcgtcggcgttccccaggtaaacgacccgaagaaacgcacgatcacccccgttatttccgttcctgagattgaccagagagaggtttatcagaaccttgaattggtgaagtctgttggcgactaccattctaccgatggtggcgagtcttgggacaagcgtgagtatccggcgagcattgattccagccgtgtgaagatcctttatggcgatgagggtggcgcactgaaagacggtgtcattgagatccgtcgcggcgttgctgaccttgatttgggagactctcactatgctcaggttcgtatccttgtagatggcactcattacctcaaaggaatggcgatgtattctgacgatatgcctgatggcgcagacattgtctttaacaccaacaagcataccggaacacctaagatggatgttctgaagaaaattcaggatgatcccgacaacccttttggggccttgattaaggctaatggccagagtcactatatcgacgccgacggcaatgagaagctttctgcgatcaacaagctgaaagaagagggcgactgggacaagatgagtaaaaatctttcttcccagttcctttccaagcagcccatccagcttattaagaagcagttggatttgacttacgctgatgctgctgatgagttctcggagatctgttcgttgaacaatcccaccgtaaagcggaagctcctgttagactttgcggatgagtgcgactcggctgctgtccatctgaaagcggctgctctccctcgtcagagcacgcaggtcatactaccgctcaatgcgatgaaagagaccgagatctttgccccgaactatcgtgatggcgaaaaggtcgtgctaattcgctatccgcatggtggtacctttgagatccctgagcttacggtcaataacaaaaacccgactgccgtttccgttctcggaaagaacattcgggatgctgtgggtatcaaccctaaggttgcagagcgtctttctggtgctgactttgatggcgaccaggtcgttgtcattccgaccggtgggagggtgaaaatccaatctacccccgcccttaaggatttgaaggacttcgatcctaagactgactactcaactgagggcaagactggcgttcggctccttgcaaagggtgctgctacacagagacagatgggtgagatttcaaatctcattactgacatgactctgaaaggcgctactgagcctgagatcgcaagagcggtcaaacacagcatggttgtcattgatgcggccaagcacaagctcgactaccggcagtctgagaaagacaatggtatcgccgagctcaagaagaagtatcaaggctttgacgacgagactggtcaccatggtggcgcctctaccctcttatcccgtagaaagcaggatgttgaggtaccggagcgtcagggcagcggtgtcattgatcctctgacaggaaaagtcgtttacaaggagtccggcagaacttatgtggacccccgtaccggaaagacggtagcagcaaccactaaggttaaacgcatcctcgcggttgatgatgttcgttcgatgtcttctggaacgcttcaggaagaggcctatgccgactatgccaataagatgaaagaccttgccaacaaggcccgtcttgaatacaaggctacccctactctgaagcgctctgccagtgcggccaaggcctttgagcccgaagtgaaccgccttatggctgctctcaaggtcgcacagttgaatgctcctcttgaacgagaggctcaacgaattgcaaatgctcgtgtaaaagcaaaggttcaggcaaacaacattactgacaaagatgagatttccaagatccgtcgtgctgctatcagtgatgccagaaattctactggcgcaagcggaaagcgaactcgcattacaatcagcgatggtgaatggactgcaattcagtctggtgcaatttcagacacaaccttgagcgagatcttgcgctatgccgaaccgaaaactgtcagagaacgagcaacgccgagaagaacaacgcagttgtccgatgctcgcattagcagaatcaaagcaatggcgaattctggcaacacaaatgctgaaatcgctgaagctttgggaatttcgacttctgccgtttcaaagtatctgaattcatgaaaggaagtgagagaaaatggctcaatcatgcgcgctaactacgacagacaatccgtatgatccctttacccagtacgatgcttggtatcgctttgatgaaggcaaaggctatcactcttgcgcctatctggcccgtatagccaggacctccgatcagctttcagatgctgaaaacgaacaggaacttgagcgtgccattgacgacatcatcaaatacgatccccttgggatctacaaaaagtaaaagcagacacaaaggattcgccttccgtgagtgcataaaggctttagcagcctctttcgctcaaatcgggaggctttatcttttgctctgcttttacaacacgataagttttaactccaagtcaccttttgcttagcgagattaccttgctttctaaaaggtatagggggggtcgcaaaaacagcaccccctctgcatcgcggcggtctttgaaaattctccgggggatatttttgaaaaatgtttttcggggttgggggcagccggcgggagttttgggcgacgagacagggtttgaacgggcccacagggctgatatttcacctcctgatgtgttcttctttccatggaattgccacgaccgggtcatgcaagtgctttctctacctccatctttcatttggggatttctcctttcaacttgttcagccagtcagttctgtgggttctttcaagccctgtctcaaagtccaaataagtgatgcaaaacacagcgaataccatgatcaaacacagcgagaggaggtggcaaggatggcaaaggccgcaagatcatctgagaaagtacctaaatcccgtgcggctcttactcctgaagcaagagagaagcaactgatcgccttagccattgatgttgccgaagagcaaatgcgcaacggcactgcttcctctcaggtgatttcccattttctgaaactcggctccaccagagcccagatcgaaaaagaattgcttgagaagcagagggatcttgccgcggcaaaggccgaagcgatcgagtcctccgccaagatggaagatctgtaccttaaggcggccaaggctatgaagagctatcaggggcaggaggatgaagaggatgaatattaaaagctattcagaacttgttcttcttccaacctttgaagatcgctttgagtatcttcggcttgatggcatcgtcggcgaaacaacttttggcttcgaccgttatatgaaccaggtcttttacaggtcgctggaatggaagaagatccgagacacggtgatcgcaagagatcttggctgcgacctcggcatcgaaggtcacgagatatttggtcgagtcatcattcaccatctgaacccgattcggcagagagatcttctggaacggacagacattctgctcgaccctgagtatctcatcacaacgacccatgagacgcatcaggcaattcactacggtgacaaaaatctgttgctcaccgaaccaccgcagcgggcaaggaacgatacttgcccctggaaacattaaaccaaaggaggaaccgactatgcagaataatcctcgtaagcaggacatcattcaggagcttcgcggtaagcgtcaggatgtgacggaactctgcactgaggcagaagcggtcgatgagccgcacactggctccggtattgttacggattgtctctatctgaatgtacgtaagctgcccgacatcaacgcagatgttgcggtcgtcattgacgtgctggcacaggtctgcgttgacttggatgcgtccacggaagacttttacaaagttcgcacttctgatggggtcgagggcttttgtatgagaaagtacattgccctttccaagtaaggagtgcatctatggatacgactgaaagcatcctgacatcagtgaagaagcttctcggaattgacgagagttacactcactttgacgccgacctcatcatgcacatcaactccgtcttttccattcttgggcagatgggagttggcccaaagaaaggttttgccatttcaggggctgatgaaaagtggtctgactttctggaggatgaccccggtcggcttgcccttgtaaaatcttatatgcaccttaaagttcggctgcttttcgacctgcctaccgcttcctctgctgttgacgcgatgaaccgtcagatcagcgagtttgagtggcggcttttcgtggcggccgataatgctgcaagagagggggaaagtcaaaatggatgaactttgccactatggcatcaaaggccagaaatggggtgttcgccgttttcagaattcggacggcagttacacctctgagggaaaacgccgcgctcagcaggagaagaaagatcctgtgaaagagatgaaagatgaagaccttagaaaggcaatcaatcggttatctctggaaaacaaatataaggatctgactaaaaagccgaccccgccctccaagcttgagtcgaccaagaaagctgtggatgccacttctgaacttgtcaatcgggcgaagaagatggatcaggacagccgcaaggctacgaagaaagagcggatggacctgagcaagaagacagacaaggagcttcgcgaccagatcaaccgcgagcttttggaacggcagtacaacgatctgtttgccaaggagtcggtgtccaaaggccgccgctatctttccgatgtgcttgacaacgccggaacggttttggctgtcggcagctcggctctgagcattgctctcgcaattcagcagttgcagaagaaggcggggtaatacttgatggccctgtcgaatactgctgttccccggtattacggaaagtttcgtgaagcagtgattcggggtgagatccctgtctgcaaagagatttcgatggagatgaaccggatcgacgatctgatcgcaaatccaggaatctattacgatgataaagctgttgagggctggatcaagtattgcgaggcagagatgaccttgacggatggttccgatcttcacctccttgacagcttcaagctgtggggcgagcaggtattcggctggtattactttgtggagcgcacggtctatgagccgaacgctgacggacgaggtgggcactatgtcaagaagatgatcaagaagcggcttgtgaacaagcaatacctgatcgtcggacgaggcgccgctaagtcgatctatgattcgtgcatccaatcattctttgagaatgtagacacaagtacgacccatcagatcacgacagctccgaccatgaagcttgccgaagaggtcatgtcaccgatccgcactgccatcacaagagcccgcggccccgtattccaatttctgacacaaggctcgctccagaacacgactggttcacaggccaaccgcgtcaagttggcctcgaccaagaaaggcattgagaactttctgaccggctctctcattgagatccgccccatgtcgatcaacaagctgcaaggtcttcgatgcaagatcgcaaccgtagacgagtggctctccggcgacattcgcgaggatgttatcggcgctattgagcagggcgcttccaaggtggacgactatctgatcgtggccaccagttcggagggtactgttcgtaacggcgccggcgataccatcaaaatggagcttatgagcattctcaaagggattatccaaacccgcatgtttcgatctggtggtacaagctcgactctgtcgacgaggtcggctatccggagatgtggatgaaggcaaacccgaacatcggaaagacggtaagttacgagacttatcagcttgatgtggaacgcgccgagaaagcgcctgccgcaaggaatgatattcttgccaagcgtttcggattgccgatggagggttatacctattacttcacctacgaagagacactgccgcatcgcaaacgcgattactggcagatggcttgcgcgcttggcggagacctttctcagggtgacgacttctgttcgttcacctttttgttcccgctacgtaacggttcctttggtgtgaagaccagaaactacattacttccagaacacttaataagctgcccgctgctatgcgtaataagtatgagcagtttatggatgagggcagtcttgtcgttttggatggaacggttctggaccctatgcaggtctatgaggacttggacgagtacatcgttgcgtgtgggtatgatgtccgctgctttggctatgacccatacaacgccaaggaatttgtggaacgctgggcggctgagaacggcccgttcggaattgagaaagtcattcagggcgcaaagacggagtccgttccattgggtgagctgaagaagctggccgaagaccggatgctcctctttgacgaagagctgatgacctatgccatgggtaactgcatcgccatggaagataccaacggaaaccggaagctgatgaagaagcggtacgagcagaaaatcgacgctgtgtcggctatgatggatgcctatatcgcttacaagcggaatccggaagcatttgaataagaaacgaggtggaacatggatttttacaacaagccatctccggccttgtttctgatgcattacggtgtaaaaggaatgaagtggggtgtcaggcgcacaccagaagagttgggtcataagccgaagcaaatggttgaaaaaaccacagaacccggtataataaagacaactgtttatgggcatagcgccaccccaaagcaagctgccccgaattctatcgcagatcatgttcgagatgacggaaaggtcgatgtacgcagtttttacgatgaagatggttggaaagcaaaagacattcatttgagcaaccacggaaatccgaagcatcattcttttggcgaacatggggagcacattgatctctatgagtggaatgaggatggcagtgtgaaacgcattgaacggcgtgaactaacagatgatgagagaaaggagaatgaagacattctatgactttgaatgaactgaaagccgctattttggagaatggaacgggcatctactttgagtttaacggaaaaaagtgtggtgttgagcctgaagttcagaattccatatttacatttaccatgtggtatggagacagctttaaggactattccgatttcgatgaattgctgcttgatggtttctttgatggcaagtcgattgtcgatcttcttgacatcatcgaaccgagtctctattgaattcaaaatggagagctaaatcatttacaatgctccgcagactttgaacggtctgcggaattttttatgccatgaaggaggtgatgagttccgaatggaaatgacagttgccacgcggctaaagcacgcatggaatacattcatgaaccgagattcttatgtttctcggatgtcgattgggccgagttacggttatcgccccgaccgtccactcttcagccgtggaaatgagcgttcgatcattacctcggtctataaccgtattgcgctggatgtctcatctatgaccgttcagcatgtgcgactggatggcagcgaccgattcaaggaggtcatcgagagtgggcttaataactgtttaacggtagaagccaatgttgaccagaccggaagggcttttatgcaggacattgttatgtcgatgctggacgagggctgcgttgctatcatccctgtcgatacaaactttgatcctgagaaaaccggcggcattgacatcgagacgatgcggaccggcaagattcttgaatggttcccgcagcatgtaaaggttcgcgtctacaatgaccagcgcggtgagaaagaggatattcttgtccccaagagtaccgtcggcattgtggagaatcctttctatgctgtcatgaatgaaccgaactctacgatgcagcggcttatccgaaagctgaacctgctggacgccattgacgagcagaacagttccggaaagctgaacctcatcattcagttgccgtatgtcatcaagacagaagcacgtcgtcaacaggcggaattgcgccgacaagatatcgagaaccagttagccagctccaaatacggtgttgcatacactgacggaactgagcatgtggtccaactgaatcgccccgtcgagaacaacctgatgtcccagatcgaatacctaacgagtatgctttacagccagttaggtttgacccagggcattctggatggctctgccgacgataagacgatgcagaactacctgactcgaatcgttgagccaatcctctctgccattgttgatgagatcaagaggaaattcctcacaaaaactgctcggtcgcaaaagcagtccatcctgttcttccgagatcccttcaagctggtgcctgtcgataagatcgctgagatgactgacaagttcacccgcaatgaggttatgacctcgaatgagatccggcagaagatcggcatgaagccttcttccgacccaaaggcggacgagctgcgcaacagcaatctgagcgcaccggcggaaagcacgccggcatcaacaccgaaggaggacaacaatcaaaatggagaagaaacttaagtacgacttcagcggctgggcgacgcgcaatgaccttgtgtgcagtgatggccgcaccattcgccgtgatgcgtttgcgcattgcgacggaaagaccgtccccctcgtatggaatcaccagcatgacgacccgaccaatattctgggccatgcgctgctggaaaaccgcgaggatggcgtttacgcttactgcacattcaacgaaactgctgccggtaaggctgctaagctgatcgtgcagcatggagatgtggattccctgtccatctatgccaacggcctgaagcagcagggcggaaatgtgatgcatggtgacatcaaggagctgagccttgtggtcgccggcgcaaatcccggagcattcatcgactttgtcgatcttgctcatggagagggcgctgagcaggaagttatcttctgtgccaacgaacctatcacgctcgcccatgcagatgaaggcaaagctgatgactctgccgatgacggcaagaagtccgccgatggcgacaagaaagacaccggagatggcgataccgttgaagatgttatcaacagcctgaccgaaaagcagaagaccgttgtggttgctctactcgccaatgctatggcccatagcgattctgacaacgatgatggcgaagagaagaaggacgacggccacatcgaacattctgacaaatccgaaggaggagataagactatgaaacacaatgttttcgagaagcctgaggacaatcaggcgaccaccctgagccattccgctcagaccgagatcatcgccagcgccaagctcaagagcgtaggcactcttcagggggctatgaagctctacgccgagcagcataacgatactctgaagcacggtatcgacgacatcgaggccctgttccccgagtataaggatctgcgcaccggcgctcctgagctcatcacccgtgaccagggctgggtcaatgtggtcatgaacaaggtccacaagagccctatcagccgtatccgtacccgcaacatggatgcccgcggcgatgatatccgcgcgcatgggtaccagaagggcaagaagaaggttccttccggcaacatgaagctgatgaagcgcaccaccgatccgcagaccatctacatcactgactccatgcaccgcgatgacatcatcgatatcaccgatttcgatgtggtcgagtaccagtacggtgtgatgcgtcagactctgctggaagaggtcgctactgctatcctgatcggtgatggtcgcgatgaggcggatgagcacaagatctctgaggagcatgtccgttctatctggaatgacgacgatctctacaccattcactatgatgtggacatcgaggctgcccgcaacgagcttcagggtaccggcaccgcttcccgtttcggcgagaactacatctacgccgaggcgatcatcacggctgccctttactcccgcgagaagttcaagggcaccggcactcccgacttcttctgcacgccgcatctggtgaatgtgatgctgctggcccgcgacaccaacggtcgccgcatctacaactccaaggctgatctggctgccgcgctgaacatcaatgagctgcacactgctgagcagttcgagggtctggcccgcaccgacaagaccggcaagaagcataacctgctgggtatcttcgtcaacctgagcgactataccgtcggctctaccaagggcggcgagatcacccgcttcaaccagttcgacatcgacttcaaccaggagaagtacctgatcgagactcgtctgtccggcgcgctgaccagactgtggtctgctatcgcactggaagagcccgtgaaggcctcttccggccagaccgaggatgccggtcacgacggcatctaagggagaaaattcaaaatggcaaaattttacggaccggtaggctatgctgaaacggtggaaacggcgcctggtgtatatgtggaaaagatcacggagcggatgtacttcggaaacttgacccgtaacaccaggcgtcttcagtcatcggaaacgctcaatgacgacatcaatgttgcgaatgagatcagcatagtcgccgatccgtttgccaaccagaatttccaccgaatgcggtatgttggctttatgggggcaaattggaaaatctccaatgttgaagtccattatccaagattgatcctgacgatcggaggtgtctacaatggagagactgcttcttcagaagacgctatctgacattcttggatgccccgaccgaggcgaaaagtgccgtgtgtactttcagcctcccgccagcaaggaaatgatttatgactgcatcgtttacgagcgcagccgtattgaacctacttttgctgataatcagccctatgcgcttcacgaccggtatcaggtaactgtgatttacagaaatcctgacagcgagatcccaagcaagatcgcgcttcttccgatgtgcagccatgaacgccactataccaaagaaaacctgaaccatgatgtgttcaacctatatttctaaccttacaaggaggaaacagctatgaagatcaaatgggatgaagccggcaagcgtctgtatgagaccggcgtcgaccacggcgtcctgttcccgatgggcgaggacaatgcatacggcaaaggcgtgccctggtacggcctgagcgccgttaacgagagcccctccggcggcgagcctaatgccgtatgggcggacaacatcaagtacctgaacctgatgagtgccgaggacttcggcgccaccatcgaggcttacacctatcccgatgagttcgaggcctgcaacggctgcgctgagatcgccccgggcgtcaccatctcccagcaggatcgaaagatgttcggcttctgctatcgcacgctgatcggcaacgatacggttggtacgaaatatggctacaagctccatctggtgtacggtgcgcaggcttctccctctgagaagaacaaccagaccgtgaacgacagccccgaggctgccaccatgagctgggagatcagcaccacgcctgtggatgttcccaatttcaagccgaccgcgcatctggtcatcgactccaccaagaccgacaaggccaagcttgcgaagctggaggagatgctgtacggcaccgatggcgaccaggccaccgaacccatgcttccgatgcccgagaaggtcatcgagctgacgaaggctgccggctgattcacggtacaagaacttctaaagcggggctctcttcactgagggctccgctttctttaatttttgaaaggagaaagcatcatgcttaagaaaaccatcgcttataccgactacaacggtaccactcgcaaggaggatttttacttcaacctgacacaggctgaggtgactgaactggaggtctctgttgagggaggcctggtcgaaatgatcaaccgcatcgttgccgcgcagaatggcaaggtcatcatcgagactttcaaggacatcattctgcgcgcttacggtgagaagtctccggatggccgtcgattcattaagaaccaggaagtccgcgatgccttcgctcagaccgaggcatacagcaacctgttcatggagctggcaaccgacgctaaggctgcgagcgagttcgtcaacggcattgttcctcccaagacggaaaaggcagccccggccgatcagagtgccgaagctcccgctgttcctgaaaactgatgataatgaggaccggcgatgctgaagatcacagtgccggctaccgaattgtttgacggggtcggaaactttatcaacaccaaggagcagacgctccagttggagcattcgctggtctctctttcaaaatgggaagccaaatggcacaagccttacttgtcccgcaaggcgatgaccatagaagagacgatcgactacatccggtgcatgacactgacacagaatgtcgacccgaatgtgtataaagcgatcactccatcaaatttgaagacggtcacggagtacattgacgctccgatgaccgccacgaccatctccaatgcaaagaaaaagggtggaagccgtaaaatcgtcacggcagaggtcatttattattggatgatctcctacggtatcccgtttgagtgccagaaatggcatctgaaccgacttctgacccttatcaatgtgtgtaatgtggaggggtcgccgcctcagaagctttcgagagcggaggttgccgcgcagtataaagcgcttaacgctgcccgacggaagcagtggaatacaagggggtaataccatgacagaaaaagaactgagagccaaagtagtctcgattgcagagaagtatctcggatgcaaggaaagcaatggctcgcatagaaaaatcatcgacctctataacagtcacaaaccgcttgcacgaggctaccccgtgaaatacacagacgcctggtgcgcaacttttgtgagcgctgtgtttattgaggccggcttgacagagatcgcgccgaccgaatgcggatgcggagcaatgatcaatctttataagaagatcggtcgttgggaagagaatgatgcctatgtcccctctccgggtgatgttgttatgtatgactggcaagataacggcgttggtgataataccggtgccgctgatcatgttggcattgtggtgagtgtttccggaaattccatcaaggtcatcgaaggaaatatgagtgatgccgttgggtatagaaccttgcgggtgaatggcaaatacattcgaggctattgcctccccaagtattctgccaaagctggttcgacaggttccaacacggcaacaccgccgagtaatggctcggcaagcaagcccgcaagtgctaaaaaggcatctgaggcagcaaggtctttcaataagactttggccggtacttatgttgtcacggcgaatgttgggctgcatatccgtaatggtgcaggaaccggtaaggccagtctcgccgtacttcccaaaggtacaaaagttgcaaactacgggtactacacacttgtcggcaatgtaaagtggctttatgttcaggtcacttacaagggtgtcacatacaccggattttgcagttctcagtatttgaagaagtaaacaagtgcaatttggaggaaaacatgatcacgttcagacaaaagggcgacttctccaagctgacgaggtttttggagagagccaaagaaacggtgcatctcggagacctcgatcagtatggccgagccggagtggccgctcttgcgtctgcaacgcctgttgactctggagaaacggcccaatcgtggtattacgagatcacgaacaagaagggttttgtgagcatctcgtttcacaattcaaatattcaaaatggagttccaatcgccatcattttgcagtatggacatggaactggaaccggcggctgggtagcgggacgtgattacatcaatcctgctatccggcctatttttgatcaaatcgcaaatgacgcatggaaggaggtcacgaagacatgagcacaacgatcgacgagagagttgttgaaatgcgattcgacaaccgtcaattcgaggcgggtgtgaagacaagtttgtccacgctcgacaaactcaaagagggtttggatctggacggtgcggctaaaggtctgaagggccttggcgacgcggctaaaaagtgcgacctttcgacccttagcaattccgtcgagactgttcggatgaaattctcggcgctcgaagtcatggcggtgaccgccctttcaaacattaccaactcggtcatcaataccggaaaacggatgatcgaatcgtttacattggagcctcccaaacaaggctttgatgaatacgagctcaagatgggctctattcagacgatcatgatgagcaccggcgcatcgttagaggaggtcaacaagtatcttcaggagctgaacacctactccgataagacaatttactctttccaggatatgacctccaatatcggtaagttcacgaatgccggcgtcggccttgaggatgctgttatggctatccagggcgtgtcgaatgtggctgccgtatctggtgcaaatgcaaacgaggcttcccgtgcaatgtataactttgcgcaggccctgtccgcaggatatgtcaagctgatcgactggaaatccattgaaaacgcgaacatggcaactgtggaattcaagacgcagcttttggagtcggctgttgcgtgcggaactttgacgaaaaccgcagacggaatgtataagaccgtcaagggaaatgtcatcgacgccacacataactttaacgattctttgcaggatcagtggatgacgacggaagctcttgtcggcacacttcgtaattatgctgatgaaacgaccgatatcggcaagaaggcattcgctgctgcacaggatgttaagacattctcacagttgatagacaccctaaaggaagctgcgggctctggctgggcgaatacctgggaaatcctctttggtgactttgaggaaaccaaggaattgtggactggtcttagtcaggcgatcggcggatttattgatacgcagtctgatgctcgtaattcggtacttcagggatggaaagaccttggcggcagaaccgagctgatcgagtctctcaagaacacgctcaaggggatcgggacagttatcaagccgatcacagaagcctttcgtgatatttttccgccaactactgcggaacagcttcataatctgacggaaggactgctgaagttcacagaaaagctgatgcttagtgacactgcttccgaaaacctgaagaacaccttcaagggtctgttcgccattcttgatatttgcaagcgggcaatcggtgcaattctgggtccggtcggttctcttcttgggaaagtaaccggcttaggcggcggtgttctcggcgtgaccggctctatcggagaatggctcgtcaagcttgacgaagcgatcaagaagaacgacgcctttggcaaaggcattgaggaaatctctgattttgtgagcggtgccgttacggccatcaagaattttgccgagtctgttcgtgaatacctcggtctgccgacgcttgacgaagcgaaggagtctatgaaagaactctttggtactgccgaagagaatattcaggttcctggactggaactcctgcacacgatcctggagaagctgaaagagcgtgccggtcaggtcaaagacgctattgtcggtctgaaagatggcatctccgatgcgttttctaagattggcggaaataccgatgtgtcgaaatttgccgcattgatccaagcactatccattgccgctaagaaaattggcgggggtattttcgatgcgctcggcaacggcatcaataagatcgtaactgcggtgagtaacgctgattttagcggaatcatcgacctgctgaacggaatttctatcggcggtattgcgattgccataaccaaattcactaatagtttgacgaagccctttgatgaagtcggaggtcttcttgacaatgtgaaggggattctggatggggttcgtggatgctttgaggcgtatcagacgcagttaaaagccggaactttgctgaaaatagcaagtgctattgcaattctggcggcatctatcgtcgcgatttctcttattgatagtgagaagttatctgcgtcactgggagctattacggttctctttgccgaattgatggcatccatgtcggtctttaccaaaatcagcggagatgttaaaggcgcggtgaagagttcgacagtgatgctcgccatgtccacatccatcctgatccttgcatcagctctgaaaaagatcggtgacttggatggtggacagcttgcaaaaggtgttgccggtgtgacagccttgatggcggcgatggtcggtgcggtgaagctgcttaacatgagcggcggttcttcgatgaagggtgcgacacagatggttctctttgcggcttccatcaagatccttgcatcggtctgtacagaccttgcaacacttgaatggaatgggcttgtaaaagggctgactggtgtcggtgtactgctggcagaagtctcactctttatgaacaccgcaaagttcagtggaaagtctttgacaacagcggcgggaatcgtcatccttgcctcggcaatcaaaatcctggcatctgcctgtaaggatctcggtagtctcgatttcggacagcttgtgaaggggcttggctccattggtgttcttctggcggagatcacggtctttaccaagttgaccggtaatgcaaagggtctggtatccaccgggatcgcgatgatcgggattggcgctgctatgaaaatctttgcttccgcgatgggcgacttcggaaaccttgactggaatcagatcgccaaggggcttgtcgctatgggcggcgcattggccgaagtggctatcgctatgaaggtgatgcctaagaacacgataagtgttggcattggtctgatcgctgtcggtgcagcacttgagatcgtggcaaatgcccttggaaagatgggcggtatgacctgggaagagattgcaaaagggctcgtcacaatgggcggcgctcttgcagagcttgccatcggtctgaatgtgatgaacggtactttgcctggctctgctgccatgctggtagcggctggcgcattggctattctgactccggtgctgctggctcttggctcaatgagttgggagagcatcgccaaggggcttgtgacgattgccggtgcattcaccgtgatcggtgtggccggtcttgtgctgactcctcttgttccgacgatcctggcactttccggagcatttgcgttgatcggtgtcggtaccgcagccatcggagcaggtcttctcgctgccggtgccggactgtcggctattgcagtcggcattaccgccttggctacttctcttggcgcaggtgtgaccgttattgtggcaggactcagcacgatcatcacagggattgccgcgttgatccctgccgttgccgaaaagctcggtgaggctattatagcgttctgcggcgtgatcactcagggagctcccgctattggagaagctgttaaggccgtcgttcttacgctggttgatgtacttgttgagtgcgtccctgcaatcgctgacggtgcattagcactgctgtccggcgtgctcgcctctcttgcaaactatactccggaaatcgttgactctattatgctgttcctgatcaacctgctgaacggcattgcagagcggctgcccgaactcattcaggcggcagtcaatgtgatcgcggcattcttctccggcatcattgatgctctggcaggacttgatacaagtgtattggtgaaaaccatcgccggcatcggtctgctgtccggcattatggtcgcattgggtgcggtagccgcattgatcccaagcgctatgataggtgtgctcggcattggtgctcttatcgctgagctggcgatcgttcttgctgctgttggtacccttgcacagatccccggcctttcctggctgatcggtgagggcggtaagctgctggagcagatcggtacggcgatcggtgggtttgtcggcggcattgtcggtggattcatgagtggtatttccagtcagttcccgcagatcggcagtgatcttgcagcgtttatgacaaatgttcagccgtttatcgacggcgcaagcagcatctctccggcgatgttcagcggtgtgcaggcattgacagacgcgatattgctgcttacgaaggccgagcttgtgcagggtattgcatcctggttcacgggtagttcttctctttctgattttgctgatgagctcgttccgttcggagaaagcatgacggagttcagcaacgcaatcagcgggatggacgccgaccttgtttccaaagcggcgactgccggtaaggcacttgcagagatggccacaacgctgccgaacagcggcggtgtagtcggcttctttgccggtgagaatgacatggacaagtttggagagcagttggttccgttcggaaaggccatgaaggattactctctcgctgtcaaaggaatggatgtcggtgccgtcagcaattccgcttctgccggtaaggcgctcgtggaactatccaataccattccgaactgcggcgggcttgtgagtttcttcaccggagacaacagtattgccgacttcggcgaccagctcgttcttttcggcaatggtcttgcggcttactccgcctctatcgagggtatcaacatgagcaagctctccagcgcgatcacacaggtcgagaagctggtggcgctttccgatatggtgaagaatatggatcagtatgcatttgtgaactttacgaatgcgctgattctgctggcaaacacaagtatccaaaactttaccgacgccttctataacagtggagctaccgtgagcacggcaatcatctatatgctcaattccgcaggcacgaccatccggcagaaccagacgatcgttaatgtggcgatggctgagctgatgcttgcgatggccgcgactgtgaaagcacataccacgagcatgaataccgcggtcgtgcagatgatggtcggcttcagcaccacgatccgcagcaacggtgcttccgtgcggacggcgatgcagtctgtcatgctggtcgttgtggcagaagtgaacaactacaaggaccagttcaatgaagccggcaggaatgtttcgcagggctttatcaacggcatccgctcgaagctgagcggcgcctctcaggcgggccgtgatctgggccttgcggcgctgaatgcggcaaagaaggcgttggacagccattctccctcccgtgagtttatcgagcttggtaaaaacattggcgagggtatgaccatcggtatcaacaacgcgatcgttccggtttcttcggctgcggcaaagatgagcgatgaagccatcaaggtcgcgcagaagggactcgactcctttaaggattgggcggaagagcggaaatattacagcgagctcagcttgaaagaggagcttgccggatgggaaacgctccagaagaaataccgcgagggcagtgaggaacgaaagcagatcgaccgcgaggtctatcgtgttcaaaatgagttggttacggccacttatcagtattcgatgaactggatcgaagagcagaaatcgtataacaagctgacccttgcggaggaactggctgcctataagcgtgttcagagccgatatgccaaggggacagagctgcggaagaagctcgacctgcaagtttaccagttggagaaagagatcagcgacgcgcagaaacagtatatctctgatgtgcagtctgtgcagagcgaggcgaaccagaagcggctcgacctggaggaagagtacgccgataaggtaaagtcgatcaacgcgcaactggcgagcgatattcaggctgagaacgacaagtacgagaatgctctgaaatcccgcgaggattccctctataagtcctatggcctctttgacgctgtgaaggagcgtgatgaggtcagcggcgacaccctgatgaagaatcttgagggtcaggtcaaggaatttggcgaatggcaggatattttagagtctcttgccggcagaggacttgacagtgaccttatcgaggaacttcaggatatgggtcctgacgcgatcgcccagatcaaggcgctgaacaacatgagcgactccgagcttgagaagtatgctgacctctggaaggtcaagcacgcaatggctcgcgagcaggcggtcggcgaattagaggggctgcgtgaagagacccagcagaatattgcaaaactccgcgaggaggccgatcaggagctcaccgagtatcgtgctctctggcaggagaagatgaaccaggttacggaagatgccaacgctcagttggaacagctccgcagaagctttgaggaaaaggttggtcttatcaagaacaatactgaggatgagcttcaggagatggccgacacggcgcagaaggttctgacggaagctggctgggatgagaccggcaagcagatcgtcaaggggcttactgaaggcattcagtctgagaagtccagctttgttgatgagatcacgcaactggctcttgcaggcgtacaggcggcgaaatcgacactggacatccactctccatcgagggtattccgtgagatcggtaactacaccggccttggtttcgtgaaaggtcttcaggactatgttgaccgatcttatgcggccggttctgagatggcggagtcggccgagggcggtctttccggtgtgctccagaccattgccgacattgtgagcggcgggttcgacatggagccagtgatccgtcctgttctggatctctccgccgtatcggctggagcagacgccttgaacaacctattctattcgcagcgagcggtcggccttgtcgggcaggctgccgttgcatttgaggcacagcgcggcggaagcagccagacaaccatttccgtcgacaatgatgatgttgtggctgaactccgtacgcttcgaggtgagatggcttcgatgctggaacgcatggagaagctgcgtgttgtgctgaacaccggtgcgctcgtcggcgaacttgctgaaccgatggatgtggcgctcgggcagcggtctacacaaagaggaagggggatttaagttgtaccattcgatcacatttggcgataagaacacatgggacgattggcggcttgcccccgcttcccgtccgctattcaatccacctgcgcaaaaggtaaagactctggacattcccggtggggacggcgtcattgatctgtcgcaagccctcaccgggtatccggtgtatcagaaccggacagggtctatcgagtttattgtcatgaatgatttcaaaccatggcacatggcgtactcggacatcatggactatctgcatggacagaccatgcgggcgatccttgaggacgatcctgaatatttctacgaaggtcgcttcacagtgaacgcctggaagtcggaaaaggactggtcgcggctcgtcatcgactacgatgtcggcccgtacaagtggaaaaacctttcctccatcgacaactggctatgggacccgttcaactttcaaaatggagtcattcaggcagctttgttccgcaatattgcggtgacgacagagatgaaagagatcgagctggacgcggtgatgtacggacgggctccggtatgccccagattcattgtgcaaagtagtgaagggcgcggcgttcatgtccgatttgtcaaccgtcagctcagcatcgacctaacaaagcttttgccggatggaaccattcagatccctgagtttattctgtttggcgactatggcggaacgatctatctttgggtcgacgagggaacggggaccgtgtccgttgatttcagacaagggaggttgtaagcgatgtattctgtttatgccgatggcgtctgcatctacaatgatgccttcgcgttggacaacatgaagcttgcaagccccaagctgacgctggaagacaatgcggccggttccttcgtgatgacggttccgccctccaatctcggatacagcaccatcatccgtatggtgactgacatcgccgtccacaaggacggaaaagagatctgggcggggcgcgtcctctctgaaaacgaggacttttacagaaaccgggtgcttacttgcgagggcgagcttgcattcttcaacgacagcacacagccgcctgcggagtacgccggagggacgattcgtgagtaccttgaggcgatgatcgccattcacaacgcaaaggtcggagacaaccggaagttcaccatcggcattgttactgtggtggatgaagattttccgacttattacaccaactatgaaaagaccatcacgatcttgaatgcgttggtggcgcagtacggcggtcatctgcgggtgcgtaaggaagacggcatccgctatctcgactatttggctgattaccccgacacttgcagccagacgatccagttcggctccaacctcatcgaacacaccaagggatgggatatgacggagttcgcaacggtcatcgttccgcttggcaacaggcttgacaagagcgagatcgaggcattggacgcctatctgactgtggagagtgtgaatgagggcagcctttatgtccagtcctccgaggctgtgaaaacctatggctggatcgagaaaacagtgacatgggacagcgtttctgatcctgaagcgctgctggaaaaggcgaaggcatatcttgccgacttacagttcgacaatatggaactggaagtgagtgcccttgacctccattatcttaatgcgaatgtggaggcagtgaaactgctggacgagatccgcgtgatctcgcgaccgcatggtcttgaccgtgtatttcctgtcacgaagctggagatccctctggacagcccggagaatacccagtttacgctcggcgacacggtgcagacaagccttaccagtgtgaacaaccagatcagcgccgctatccttgagaaaatcgagggtctccccaaggcgcacaacatcctgaaagaggcaaaagaaaacgccacacagatcatgacagcggccacgaccggctacatcacgatcacacgggacgaatacggttctgacacgctttatatttccaatatccgcgactataccaaagccgacaagctctggaaatggaacatgaacggccttggctactcaaaggattacggaaagacctttgggcttgccattacaatggatggttctattgtggcagactatatcacgaccggtgttctcaatgctgatgtaatccgtgccggtacgctgaaagattatggcggaaacttctcgcttgacttcgagagcggcaagctgacgatgaagaaaggctccatcgacattggagacggaaacttcactgttgacgaggaaggcaaccttaccgcacgccgaggcacctttgcgggtactctggctgcggcgaaaggcaccttcagcggtacgctggtcggtgtggacggaaacttcaagggcgtggttcaggcctctgacttccttgaccgagcgggcaacagcatgatggatgacgagcgattcaagtccaaatatctgagcgtctacgggcttaccgttaccaacggtgtccgcacgacctttgctgttgattccagcggttccgttaccatagatggtaaggtgacgctgtccgccggaagcacgatcaactgggcgtccgtgacgaaccagaatctcacctccaacccagcctactcgctggcaagcacggcgaatgcaaacgcggccactgcaaagagcgcagcagatgatgcttacgatgaggcttctgctgcatggtcgagagcaaataaggcctatcaggatcggtgcaccgaccagaatgtgtttgatgtgctcacctcaggtggtacgaagttcggtattttcagcgactcgtacagcggacggctttacatcaatgccgattatattcgctccggcacaatcaatgccgattatatcgacctatcatgcgattatggtggattctgcaaagggcatggctctgacggtcagcatacgacttatggcgcgatgatgtatggttctaacggtcctggttgggagccttatattatcgttaccaatgccggcgcccgtatctccggaaccggagcagaccttgtagtttccggcggcatcaccatgagtgaagagccaagttacggttccgacttaaggatcaagaacagcatcgactatgatcttgcctcttatgaggcgttcttcctggcgctgaagccatccaccttcaagtacaacaaaggtacttccgggcggaaacatttcggcttcatcgcgcaggatgtagaacaggcaatgcttgacaccggactgacgtcggatcaacttgcggcacttgtcaaagatcctgtcaaagagatcctttcggatggcatcatagactatcgttacagcatccgatacggtgaacttatcgcgctcaatacgcacatgatccagaaactctatcaaatggtcgaagaactgcttcagcaaaaggagggataatgttgaagaaacagcttaaaaattcagaaatggtcgtgatggtccagaacctgcggccgcttcttcagctccgcaacaagatcggctatatcgccgcgaggaacttccggatgctttctactgctctgaccgagtatgaagcattcaaacacgacctcatcaacaaatacggagagcccgacaaggatgaaagtggcaacgagaccggaaccatttccatcaaggttggctctcctaattttaaggccttctgcgacgagcttgccccgttcaacgagatggagcatgaggtcgagctgatgaccgccaagtatgaagatacgatcggttgtcttagcggcgaggagattctgctgctcgactggatgctggaggactaaggaaggagtgatttagatggctgatatcagcagctttctgaaaaaaatcctcagcgccatttatggcgaagaggttcgcggctccatccatgatgctctggcggcgatgaacacggagtccagcagcgcgatggagtttgcctccaccgccaaggattctgcacaggcaaatgccgcggctgccaagaagtccgccgaagatgccgagaaaaaggcgacaagcgcctctgaatccgctgcggcggctgcactctccgaggggagcatcaagacctctgaggaaaatgtcaacaagcaggccgcagacgcaaaagaagctgccgccggtgctaaggcgtctgagacagaggcgaagaactcggaagagatcgccaagcagaaggcacaggaggccacggacgccaagacagcggcgatgcttgccgagggagaggtcaaggctgccgaggagcgcgtgagaaccatccgctcggaggctgagacgcttggcgcacaggctactgctgaccgcaacgcagcggaagaggctcgtgctgctgcggaagctgcaagagacgcggcggtgaagagtcaaaatggagcaaaagcatcggaagatgccgctgctgtatcgaagacggacgccgaagccgctaaaacggctgctgtggatgcccgtgacaaggcgcagaccgctaaaacggccgccgagaacgcgcgggagtccgccgagaactctgaggcaaacgccaagacttacaaggagtctgccgcagagagcgccgcaaccgcacagcagtacagcggaaagccgcctaagccggagaacggtacctggtggatctgggacgctgaaaagggcacctatgtaaacaccaacatcagctgcgagctgaccggcccgaccggcaacggtatccagagcattcagttgacgcagggcaatcatacgccaggctcgactgatatttacaccgttacgatgacagacggaagcaagtacaacatcgccgtctacaacggcctgaacggaacgggtacgggcgatgtgctcggcatccatttcgatctggtgctgcctgcctccggatggtcgaacggttccatcactgtggcggagagccgccttgtggccgctgccaagtacaaatacctcattgatgcatatgaagccagccgtgaagaatacctcgaatgcagtgtgcgtccgaaagacatctccactaccggcttcattacatttgtgaacgataccgacccgatcaaagacatcacggtgaacatcgtgcgtcttgaactgtcggtcaatgccgaagaaggaggcgaatgatttgaaaatcgcgatcaaaagctgcttcaccacgctggtggaggacactacactgatccagaacgcagcgacgccttatccggtcgaattcgccttcagcaaggattgggacgggttcgcaaagactgcgctctttgaggcaggcggcgtcagcatggctgtggtgcttagcgaagacaagtgcgacattccgggcgaatgcctgaagaaaggcggtatcccgctgaagatcgccgtttatggcgtcaagggcgaggaacgaaagtcgactggctggcatgtgaccagcaagatcctcttcccggccaatatcagcgttggcacaggcggctccggagacccgatgggcgatgaagcctacaagcagatcatgggaatcatcggagacccatcaacggcgggttttggaaacaagacgctgaccgaggtgatcgttgagatccagagaagcatttccggaacggcctcggataaagaggtcgacgatatgctgaacgacgcctttgcttcgagcgacccgggcggaagcacacccgacaacaccgcttctgacaaagaagtggatgacctactcaatgatgttttcggcgaacagccgtgaacaaatatatttaagggggacatgcaatatgtctactaccaagcacactactattgaacagctcaagaaactggcgctgcgcacaaagagcgagattggccttgtcgacgctaaggttgccggcctgaccactaaggtcaatgacctggtgactgccggcggcgagcctaacaagctggaaggcatcaagctcaacggcactctgctggccctgaccgataagatcgccgacattctcatcgctgagggcaagaccaacggcaccatctccgccaacggcgttgatattcccgttcacggtctggcggctctggcctacaagtccgaggttgctgagagcgatctggctgccgctctgaaggccatcatcgacgccaaggcgaagcaggctgacctggataccctgaccggcgacggcgaaggctccatcagcaagatgatcgacaaggctatcaacaagttcgccaccgatgtgaccgatgacaatgtggtcaacagctacaaagagctgatcgactgggttgctaagcacggacctgaggcgaccaagatggccggcggcatcagcgagaacaagaccgctatcgccgacctgaagactcttgtcggcacgctgcccgatggtgcgacctctaccaccgttgtcgcctacatcaccgaggcgatcaatgctctgagcatcggcgattacgccaagacgaccgaggtgactgccgcgatcaacaccgccctggagtcttactacaccaagacccaggtcgacgaaacctttgtcaagaagacggacatcgtgatggctaccgacgaggaagtcgacgccatgctgaccgaagtcttcggcgctcaggctaccgtctgatccagcatatgcgaacgggggatggggcttcctgtcccccgttccaccttttgaaaggaaggtaacaacacatggcagagcataagctttccacatttgaccagctcaaaaagctggcacttgcggggaagagggattccgccaagcaggtagctgaattggcggagcttgttgccgccggactggaggatctccagcatatcggcatctctgttactctgccggccgcgaattggagcggcggagcgcagactgttgcacatgcttccctcttagctgacagcaactatatttatcttgtaggcgcagacgccggtacccgtaatgtgtacgacagttatggcgtgagcgcagacaatgtaaccacaagcgggcagatgactttccggtgcgatacaacgccgaccgttgacttgtccgtctttatcattcgactggaggtcggaacagatgagtaatgttggcaaggtattcaacctttccggcggcggtggcagcggctctccgaagatggaaagtctgactatcgccaccccgcccaacaagacggtctataagtccggtgaaactttcgaccccaccggcatggtcgttgtggcaaactacggcgaaggtctgatggcaaatgtgacgggttacaccgtctctccctccgttcttacggacggggtgagcgaagttgtcatcacctacaccgagggtcgcatcacgaagaccgcgactgtttctgtgacggtgaaaaaggtgcttgtcagcatcgccatcaccacgcagccagccaagacggtctaccagtatcaggagagccttgatccgacgggcatggtcgtgaccgcgaccttctcggacgggagcacggcggcggtactggattacacctatccgacgacgaacttctctacactggggcgtcaggtcatgaagcttgaatacacctacgaaggcgtgacgaagagcacagaccttgtcgttacggtgcagggcaagaccattgccgttccgacgcagacgaacatcccgacctacaacggttcggataagacgccgagctggaacggctacgatccactcaaaatggagatctccggcgttacgagcgcctctgacgcaggtggttacacggcgatcttcaagctgtcctacggctatctgttcccggacggcacggatgaggcccgcgtaaagtggacgatcgaccgcgctgtcatctcggctttgccgacgcagacgggaacgcttgttgccgacggcacgagcaagacaccgagctggaacggctatgacaccaacaagatgaccattggcggcgatacctccggtacggctgccggtgagtacacggcgacctttacaccgacttccaactacaagtggtccgacggcagcacaggcgccaaggaagtgaagtggacgatcatctcggtgctcgtttccattccttcgcagagcggtacgctgacctacaacggcagcgcccagacgccgaagtggcagaatttcgacaatgagaactcctctgtgagcgtatctgccaagacgaatgccggcgagtacatggcgacctttaccttgaagaagggtatgtggacggacggtacgaccgcggcaaagaccatcaagtggaccatcggcagagctaccatcgcggcggtccccgcccagaacggcacgcttgtctatgacggcaacccgaagactccttcgtggaataccgcctatgactcggcaaagatgaccgtttccgtgacggccgctaccaacgcaggcacttacagcgccacctttacgccgacttccaactacaagtggtccgacggcagcaccggaggcaagacagtatcgtggacgatcggcaaggccgtgaacagcgtgaccaattcgccgagctccatcatgctgaagagcagtgccaagaccgcaacctttacggtgaaccgcaagggcaacggtacgatcacagccacctcgaacaacacgagcgtcgcgaagatcaaatccatcaatcaaagcaccggcgttgtgaccgttgagagcgtgaacgacacgaccggcacggccaagatcaccgtcaaggtcgccgaggggacgaactacaaggcggcttctgatacgacggtcaatgtgacggccactttcgtcacgatctacggcgttgagtgggattggacgagcagcggccagaccaagggcacgcgcacagacgcggcggcaggcttcggtgacccgtctccggcggtgaacaacggcagtggctcttctccatttgacaacctgatgccgtggtccggcatggtgaaggagacccgcagcggcggcgttgaggtcaaggagccaaagtattggttcaagtggacgaagaccggcaagaagctgaagctccagatcgcggacggttatgtcgagggcttctccgtcgaccctgtaaacagggatcgcggggacggccttggcgagctggactactcctacatcggccgttatcactgcgccagcggttataagtccaccacgggcgccgcacagcaggtaaacatcacgagaagccaggcgagaaccggcatccataacctcggtgctaacttctggcagatggatttcgctcagttctggtatgtgaatatgttgtttctcgtggaatttgccgactggaacggcgagcgcatcggcagaggctgctctacgaacggttccaagatgaacaacggtcagaccgacgcgatgggttatcacaccggtacgaccgcggcaagccgcgacagctacggcttcacgcagtatcgcaacatcgaaggctggtgggacaatgtttatgactggatggacggctgctattacaacaataacggcctgaatgtcatcagcaatcccaacaacttcagcgacagcgcgaatggcacgctggtcggcacgccctcttcgggctatccgtccgacttcaccattccgacagcaagcggtcttgaatgggcactgttcccgagcgcggcaaacggcagtcaaacgacttatgtcccggatgactggttcttcagtggtagatatccgtgcctgtaccatggcggtagctataaccaggaccagtatcacggtccgttcttcatcatctacttcaacagcgcgtcggtcacgaacgacaacatcggctgtcgcctccaggaacgcccgccaaaggcggcgtgactgttcccctgaagaggtaggggtgcaggggtgagggggccgcagccccttccccttgcatttcactgatatttttaagaaaaacaacaatttaacatggggtcaactgtgcagcagacgatggtcccggataactggaacttcaatggtagatatccgtgcctgtaccatggcggtaactataaccagaaccagaatcacggtccgttctacatcaactacaacaacgcgtcgaacacgaacgacaacatcggctgtcgcatccttgctgagccacaggctaaccctccatttggtagtaggggttcctcaccctttctatatcgcacggttgaccgcacagcacttgctgaagaaaagccgacaggacacagcttagtacacttcgggccaggtctcgccttggaacaccccgcggcgctggaacggttgtgaggctacaaggaggaaaaacatccctgatgaaacgagttcgagtttacaaagagatcatatcagacgaaaaccttcgtctggcaattcgggaagtgaacgccggccatcggcgaaacggcaatcacagcctgaacaaaaaggtcattgagatcgaaaataatatggatgaatatgtggagaagctccgagcattcatccaaggtctggtcgacggagacgagcacatgcaccctccccttaagcgacggcgctgggaccgcaacgcggacagcggcaaaggcaaatggagagacatcaacgagccgcttctgtggccggaccaatatgttcaccacgctgttgtgcagccgatgatcccgcacattatgcggagcatggaccggtactgcatcgcaagcgtccccggccgagggaactcctacggcgtcaaggcattgaagaagtggatgaagaacgatgtggagggcacgaagtattgctgcgagtgcgacatttaccactgctttgaggagcttgatccgccgtatgtcattgaagccttgaagcgggtgttcaaggacaccgaaacgctctggctgtgcgacgccattatggaatacggagtcctcatcggcgcattcttctccgcatggtttctccatttgacactccagcccttggatctgatgatccataaaaagcagtatggcgtatcacactatctgcggcagatggacaacttcacgatcttcggctccaacaagcgaaagctgaggaggctgctggaggatatcaagaagtggcttgccgagatcggaatgaagatcaaaggtaactggcagatcttccgcgtcgggtttacgccaaaagtcgagagagcacatcaggctttgccgaagaaaaagcaacggcaccgccgcccgcgcttaccatcggctcttggataccgattcggacacggttacacgatcttgcgaaagcataatctattccggctcaagcaatcgcttcatctttactactaccggcgagacaggaaccgcgtcatctcattcaagagggcttcgggactgatctcacggctcggacagcttcgcaaatgcaatcatcagcaggttttggacaggcattatcagcccaagacgatgtttgcactgaagaaagtcgtccgaaaggagtgcagaagacttcaggcattatatccgccataccaggcggcataaaaaggagtgattttcatgaaagtacagggaatggtcaaccccggcagctttactgtggaagagatccccggtaccaaacgaagtcttgtccgtctctaccagaatgtggaggcgtgcaagatcgctaaggatgccgaggacaaggaaggccttgacgggttccagtatgacgaatactgcgttgaggtcgagagttggcccggacttgctgccagcgtgcgggagaactacgacacctaccttgcaaagggtaaggacaatgaggtcgaccgcagtaactatgcgttgttccgcgctcagaaaaacacagactccatcgtccaggatacggacgcgatgagcgtggatcacgaataccgactgaccctgcttgagctgggtctctcggaataattgagaaaggaggaaaacgactatgctgtatcgcactctgaagcgcatgatcgagcgcggccagaccaacggccttgaggaaaagatcgacattttcttcgcagccggcaagctgaccgaaagcgagtatcaggagctcatcgccatgctcaaggcagaatgaacgcaccggaggattgagatgtgactattcaagagattttagccggcgggggcggtctgctcctgatccttatgaccctggtgcaaatcgcccccgtcaaaatcaacccctggtcagcactcgccaaagccattggcaaggcgatcaatgctgacatttcaaagcgcctcgacgagattgagaaaaagctggactcacatatcaaaacggatgatcaaggccgggccgatgactggcgagcggcgatactccgatttaacaatgagctgcttcgtccgatccgtcatacgaaggaagaattcgtagaggtacttgggtatatcgacaagtacgagcattattgcgaaaagaaccctgagtatccaaacagccgagcggaaattgccattgagaacattcgagaggtgtataaggtccggctgaagaaacgagacttccttcaggacgaggataagaaggaggtggcgacgctgtgagcaggtggggcatcggcctttccgagcaaatgaaagcctgcaaagaagcggaaccgttcactgatattttggagggggatgggggtgttcctgaaaaggaccccccgtcttcttccaaagcagggttcaaggtcaccacgatgaagattatcgtgtgggtctgcattctcaacggacttgcatgggtatggtgcagctatatccttgcattgctcggacgggagcagatcgcagaggccttgtcacaggtcgcgctcaaggagatcatcggcgtggtgctgatctacggtctcaaggcgctgtttgaaaacctgagcaagaacaactcgtggcctgacaagggaaactctactccgcccgaagacggagcgggataacaggaggaaaagaatatggagagtgtactgaactggtctgtcatcatcagcatcattggcgtgctggtggtgctgacgaacattgtggtacaggtactcaagaaagtaacctgggacaagctgccgacgaatgctctggcgatgatcgtttcgctggtgctgacgctcggcgctttctttgcatattgttccatcaaggggatcgctgttgtgtggtatatggtgtttgccgcggtggtcctcgcgttcatggtggcttatgcggcaatgttcggatttgacaagctgaaagaagccctcgggcagatccataagtagtgattagaggtcgaaaaaggtgtaggagagccggttatttcttgactactcctacacctatggcctaaaagtggcgtggggactggatttgatgcttctattataaaatacgtgctaaaataaagtcaaccgccgctctgcggaattcaaaaaaggaggactgccctgtgatggacagagaattttggatgggacccagttttccccagcagccccgagaactgttgaaccgcttgaaatcctatggtgtctgcgtggtggcagatgccctgaagggctttaacgccatgaacggctctattcagccggtggtaccgggcaaatgcatatgcggttgtgcggtaaccgtgcgtctgcaccccggagacaatttgttgctccataaggccattgagtccgcccagcccggggacattctggtgctggacaccaacagcagctatcgcagggccgtcatcggcggaatcatgtccggggccgctttcggcaaaggcatcggcggcttggtggtggatggcgccgtccgggatgtggaggagctccgcgcccacggctggccggtgttcgccgccgccgtggttccctgcgccgcggacagcgatggccccggccagctgaatcaccccatcagctgcggcggtgtgccggtccatccgggagatatcatcctggcggatgacaacggcgtcgccgtcatccccccacatgggtggagtgggtgctggagggctgtgaaaagcggcatcagtccgaggcccgccgcatggcggagatccgacaggggcagctgacctccgccgctgtgctgggcaagctggaaaagctgggactgtgaggaggggcagcatgatctccaaactggaacgccttttgtccggcgggaccgtgacgtgggaccgtctcctggtgacggacggcctgtccccggaggcagtggagcagatcaccgctgtctcccccgccgcgccggaccgggtctgggtggtcattgatcacgacactcccgccggctccgtggcggtggcggaaaaacagaaagccctgctggactgggcccggcagaccggcgccgtcttccgctccggccggggcatcgggtatgccctgctgctggagtccgggctgcgggagggcgagatcgtcctctccggcggagcccatgccgcggcggtgggagccgccggcgcggtgggcctgtccctgcctccggcggagctggccggcgcgctggagagcgggcagatctccctgtccccggctccgccgctgcggctggcggtgaccggcccgctctctccctatctctccgtccgggatctggcctggaccctgatccggagcggccagtgcagcggaaaagccgtggtcatccgggcgccgcagctgaccgccgcccaggccatggacctgtgcggcctgctgggcgccgccggagctgtgaccgcgctctgtgtgcgggaggacttcccggcagatgagacggtggatctgactgcccttcagcccatggcaacgccgcccggggacgccgcgcgggtcgttcccgccggagaaaccgacggactgcgggtgaatcaggtgttcatcggcggctgcggcggcgggagcctggaggccctgcgggagacagcggacctctggcggggccggaccgtatgcccctatgtgcgggtcatggtggcgcccgccacttcctctgtctatgtccaggcactagaggaagggcttctggatgtttttctggatgccggggcgttggtgatgaaccagggctgttccgcctgctgggcccagagccaggggcggtgcgatcaggcggaggtgttcgtctccactggctccatcaactgtgccggctgggcgggcagagcccacagcggcatctgcctgaccacggtccgccgggccgcccaggcggcgctgtccggcagtctctatggttcctgagaggaggtccgccatggaacagacgttttgcagccgcatctggcggctgagcgacaatatcgatactgatatcatcatcatgagcaagtatctggccaagccctccctccgggagatggtcccccatctgttcgagcccctgcggccagagctggccgcccggctgcggcccggggatgccatcgtggccggggagaacttcggctgcggctcctcccgggagatggctgcctccgtcctcaaaaccgcgggcatccgctgcatcatcgccaagagctttgccaagatctttttccgcaatgccatcaacaacggcctgctgctgatcgagtgccgggacctgtatgaccgctgccgggaaggcgacactgtgaaggtggaggtaggccggcagatcatctgcaacggcacggcctaccctgtccccggtatgagcacggaggtactggatatcctccgttacggcggcctggtgtcccggatgcgggcgctggacaaatctctcccggccgctcccgctccacgggacacgctgcgggacgtccaccgtccaggccataccctggcggagcagctcctcatccacaacaccggcgcacaggacctacgccccggagacgtggtgacggtccgggtggacgaggcggtcctccatgatatctacaccccttatatcttccagcagttccgggacatgggattctatcatgtgtatgacccggaccggatctccgtcatggtggaccatctgtaccccacctgtctggatgatgacccccgatgcttccggtacagccgccgcttccaggacgagtatggcgtgaagcgcctctatgtggcggacggcatcagccatcagctggcgctggaggagcgtctggccgcccccggcaagatcatcttcggcacggacagccacaccaccacctacggtgccgtgggcgccttcgcctccggcgtcggctatacggagatggcctccatcatcggctgcgggcagctgtgggtccgggtcccctccgccatcaaggtggtggtgaacgggaccctgcccaaaggtgtctttcccaaggacatcatcctgcgggtactgggagacctgactgccgccggtgccatctacaagtccctggaattcacaggctctaccattcagcagctcagcatctccggccgggccgccatcgccaacatggcagtggagtgcggggccaaggcggccctgttcgccccggacgaaaagaccgccgccttctgcggcgtggacctggcggactgtgactggcttcgctttgacggggatgcccggtacgaacgggtcctgacctatgacgcaggcactttccggccttatctctcctgcccctacggggtggacaacgtacaccccatcgaggatgtagcgggcacgccggtggatcaggtgttcatcggcagctgcaccaatggccgtctggaggatctggccgcggcggcggcagtgctgaaaggacacgccatcgccccctttgtccggctgatcgtgacgccggcctccagagctgtctaccgggaggccgcccggctgggatacctgaagacgctggtggaggcaggcgccatggtgacccatccatactgctctctgtgccagggccgcagcggcggtctggtcagcggagcgcaggtggtcatcggcacccacaaccgcaacttcatcggccgtatgggcagccctgccgcccggacttttctggccagtcccgcagtggccgcggcctccgcgctggagggacgcatcgccgaccccgcgccctatttgtgacggtcccagatcaggcccgcttccggggtaccccaacacaggcccccggctgtctggtgtagccgggagcctgtgttctgtgagggtcgggtgagcgggctttatgtccaggtgtaattctccacaaagttcaggatggtcttgttgaactgctccgggtcctccaggaacatcacatgtcccagatccaagaattcgtggaagcagcaattaccattcaccaaatcccgatagtgccgccccatttcgatccccgggggatggccgggctgtccgcacagcacagcaggaggggaatgtcgatcttggagagagtctctgtataatccttgaacaaaaaatcgttatacagagcaaaggcgatatataccggcagcttcttcatttccgtactgacccagtcctcgtcctcctgacaaggcggtgtatggaagcagagccgggtaaacgtccgggcgtaatcatcgtggtgggagagcgcgttctccaaggtggcagtcatggcgtccatgttgaagcccgccaaagaatggctgttccaggactccggcgaaaaagggtacaaggcagagtcgatgacgccgatcttcttcagatgctcgtcgccgaactgctcgtagtactccatcaccacactgctgcccatagaccagcccagcagtgtcacatcctccaggcccaaatactcaatgagttcatgaacatccttggcacagcggtccatagtgagattttgaagcgtttttgacgaagaaccgtgcccccgccagtctatcagcaccagccggtgatcggcggagagggcatcaatatttttatagaaaaatttggacgagcagagaaagccatggaggatcatgatcggctcccccttgtccttgccgtagtcctcaaaatagatccaggcgccgtcgctgacctgaaggaaattgtccttgctcctgatcatacctctacttcctttcttagtctttcaatgtatcgatcttggcatacttctcatcatagtcctcacagaagaacacctggaaatatcccagcttgacccgttctttctgcgtggcatagctgacagccaccaacagcaccagagagatcagccaggcaggcaggaaagcgtggacaccccccagcgccgcagcccaccactcctttgtggatgggatcacgccggagatgaaataaagaatgacgtatgcggcaaaaccgcccaccgtagaggcgaacattccctttgctgtggctttcttccagtacatgcccaccagaacagggaagtaccaggccgctgcaagggctgccagggcgaagttgatcatgtactgggtcagggtagagggcttcagggcgatcaacgtcgccaccagggagatgcccaatacaaatgcggtgttgatggtgctctgggtcttgggaggcgtgtttggcttccagcagtccaccacgaagtccttggccagtatggacgcaccggccatggccagccccgcgagagaggactggatcgcagcaaagatcccgcagaaaatgatgccgcccatccaggagggcaggagattggtggcgttgaagatggtcgtatagtccgcagtctccaggccggggttaatggcccgggtcagggggccggtgaagcacatgatgccctggatcagagtaaatacacagcaggaaatgatgacgccctgcttcaacttcttatggttgttgtaggtcatcgtgaccgacagggcgtggggtacagcgcccaggcccacgccggcaaacaacgcagtgcccatagcgttccagaaggtgaagcctgtgtccgcctggatcgcgccggggaaggctgtgcccagatactccatggcggcctggacactgccgtacttttccacgttgtcggcaatcagaacaccgatgatggagaacgtggcaatcagcatgatgacaccttgaatgctggccaccttggccatggacttgatccctccggagacggtgtagatcacagtgatgacgatggtcagcaggatgcccaagtagtaggagttggagccggtgacagcggcgaagaccttggcgccggaggtgatctgacccacggcgaaaaaagtcaggccgaaagctccggtgatagccagcgcccccacgacctttttagactggaaccgcagccccaaaagctgctggaacgtgacggcaccggtgcggtcacgcaggatcgccactttgcgccccacgctgcccaggccataggcagcagtcaggaaaccggcgtaatagaccaatgcagctgtgaatccaacggaatacccaaggccgggcgcggccaccatggtgccgccggccatggaatttgtagcggcgatcatggcgatggcaaaggctcccagcccgccgccgcccgtcagaaaggaggccaggccgtctttaccgccctttttggattgatatttgatgtagaagccgaagcccacgataacaacgctgtaaacggcaaagatgatcaacatgacccgagatgtggacgcggttacagagaatccgcccagatcataactcatgcttgttcccctccctctttcttgttcatactgtctttcttaaaccttgcggtcagcggaaactcctcccatttgaccagccagatcatgcccaccacaaacatggccagataaatcacgattgcgccagacacccacatgggcatgcccagaaagtacctcatctctgcgggatcgccggttccgaaggcgtacatccagatggtggcgatcactgtggccaccacccccagcacgtgaaagaacacggcgtcttttttgcccacctccaggcggcggtccagattgcccacctgggcggggtcatagtcggtactctccagatcgacatttgacagttttttgttttccatgattctcactcctttaaaattctcttccggccggcagattccggtccggcttgctgctcttctttttagcaaaagatatgccattcatttattgtccgttttgcctaaattgtccttgcaattttgtcgttttccaagatatattagaaaaaatgccctctgattttctctgattcgcgaatttgtttttcgcatttcggcgaaatgcaaatttttcagaaaggaattgaccacagcatggtacagagaccggaaacacatctggccggggatctggcttcaacccccgcagctcagaaggaatatgagttgttgaagatcttggcggagcactacttcggcagcatgctggtcacggatgaccggggccgttttctctatgtcagcgacggcacctgtcgccttttgggtgtcgaccgtgagacgctgctgcagctctcgatctatgataccctcaagggctactgctttgccaccagcgcttcttccatcaagacgttggaaacaaagcaggagtgtctcagcaaccacacgctgaccgcctccggccgacaggtgcttgccctgtcccggcctcacttcggcccggacggggagctgcaatacgtccctacatacagctgggatgaggaggagctgtacaccttgctggagaagttcgaccaggagcgggacaacgtccgcaacgtcattcgcttcatgcagggcactgacaaaactccatccatgatcatcgcggagagtgatgccatggtgaaactgctggagtatgccgatcatgtagccgcggtggacagcaccgtcattctgtacggcgagtccggcagcggcaaggagatgttcgccaaatacatccatgcccgcagtgaccgagccgatcaggttttcatcccgatcaactgcgcctctctccccccctctttactggaagaggagatgttcggttacgaacggggcacctttaccggcggttccaaggacggcaggatcggcctgttcgagttcgccgacaagggcactatctttttggatgagatcggcgaaatgtctctggaactccaggccaaactgctgcggatcatcgagaccggcgaagtcaagcgtctgggcagcaaccgaatccagaaatgcgacgtacggatcattgccgccaccaatcggaatctgcgggagatggtagaggaaaaggcattccgggcagacctgtattaccgattgaacgtattgaccatccacgtgccgcctctgcgggaacgagtggcggatatcgccccactgacccggtactttgtccagcttttcaacaaaaagtatggctttacaaaacatctgatgcccgctctgattcgggctctggaacagtggtcctggccgggcaatgtccgagagcttcgcaacaccgtggagcggatgatggtggagagccgggattccatcatcgatgcggcggccttccgggaaatcccaccgggcatatcctctccaaaaaccagcgaatgcccagtcccggaccttctgccctatcagcaggccatgaatatctatgagcgggaatacctctccgccatggtggcatcctgcggcggggaccttcgaaaagccgccggaaagatggagctccacctttccaccctgtaccggaagctggagaagctgggtttgaagccaccccggacatccgggaactgccagggccccggagaagaaccgctccactgaaaaagccggcatgaaaattgcttaataattttgacgcggtgttgaacaccgcgggagagaaggaaccgattttgctggagaatctgctgttcagcctcaatatgagcctgcccctcttcatcgtcatggggctgggctgtattctcacccacaaggggtttttcacagagaattacattgcccataccaccaatctggtgtactacgtactgctgcctggaaaaatgtttctggacatcgccaccagcgatctcagcaccgcctttgacatcagatatgtcgcggtggcaacgggcggcgtggtgctgcagttcgcgctggcctgggcagccggctggctgctgtgtccggaccgcagcaagcagagcgccttttcccatgccgcctaccggggcaatttcgtctatctgggcacggctcttctgcgaaatatctatggagtctcccatgtgcccagcgcaacgctgatcctggcgctggtgatccccctttacaatattcagggcgttgttctgatgactgtcaaggagcgccagggccggttccgcctgtccaccgtgcttctgaacgttctgaaaaaccccatgatcctggctgtgcttgcagccatccccttcgcctatttcaagatccagctgcccttcgtggtctctgagagcctgggctatttccaggccgccaccaataccatggcgctgctggtggtgggcggaagcatccgtctcagtgccctgaagaacgatctgccgctgctcatgcgtctctgcggtgtcaagctgttgctgatgccggccatctgggctgccatggggatcgccgccggccttccggcggagcagctggtcaccctgatcatcgtcggcgccatgccggccgccgtcaatgtctacatcatcacagacaagatgggcggcgacggagccctggcctgcagcgccgtagtagtgacccacttgatgtctctgttcaccatgacagccatcatctttgccatgcgcacagcgcggctcatatagggcgtacgccgtaacgttttgaaacattgtctctgttacataagacacgccatgcaactctccggtggtcaagcgtatcctctgcggactatatccgcaggtcgaacaaatatcatgccaatcagcaaatatggaaaggagtttttcacaatggatctaccgaaacgcattgagctgatcgaagtctgccccagagacggcttccagaacgtccatgatatcattccctttgagggcaaggtcgctattatcaagaagctggcagaggccggcttcaagcggctggaggttgtctccttcgtcagccccaaagccatcccccagatggccgacgccaaggaggttgtggccgctgtgcgggatacgctgaaggcgcacggcgtccgcacggtagcgctggtccccaacgcccagggcgtggagaccgccgtggagtgcggcatcaacgaactgacctatgtcatcagtgtcagccgctctcacaacatagccaatgtccgccggacgccggaggaatccatggaacagttcaagaccctgattcaggagtacggccacaagatcgacttccgcctggctctggctaccgctctgggctgtccttttggagaggagatccgcaccgagcgggtggcggaaatggtgcagttcggcctggatctgggctgcaaggaaatctccattgccgacacggtaggcatgtccaatcccaagcgcacctatgacctgatgaatgcgctcaccgcccagttcggagcggacaagttcgtcatgcatctccacgacacccggggcctggctctggccaacaccctggccgccatgcaactgggcgtccacaagtttgaaaccgcggccggcggcctgggcggctgtcccttcgcccccggcgcagccggtaatgttgccacagaggataccctgaacatgatgcatgagatgggcattgagaccggcatcgacaacgatgcactccatgaggcggtgctgctgctccaacagtatgtccacgcccctatcgtcagccatctgatgtccctgtacaagacgaagccctgcgtctaagggatcagcggcacagaatggcaccagcggcgtttcactcgctgctgacgccggtccttccccggacttgggagccttttagggaaaatcactcccatcccagtgcaacgtttttctggtgcatcccttcgctggcgcgtagtgcggacagatttcagtcggtccatccgtatctgcgttcaaaacgtagagcagagaggtatatatgtggagatattgaattggaaagacgttcagcatgtcaacgatatctgtgttatggccccgaccctacagttggcggaaaaagctgagatgctgatcaaacaggagaattatcagaacattgatgtagtggtggccgccagcggccgccaggagacggtcaagtgtgcacagacgctggcagctgcgggtgccgaaatcattatcacccgcaaagggacccgccggatcgtggaagaggtcaccaacctgaaagtcgtgagcctgaacaactccctctctgactatctttggatgctgaaggagcgtggtctgcacacacctggactgattgcttttttttcctatgatcccatgagttctgatattctgcagatgtgtgagatgctggaggtgcagacaaagaactacatcttcaaaagctttgccgactgccggggctgcgtggagcgtgccctgaaagacggcgcggtgtttagtgtgggcggtgcctggaccgatccgtgggccaaaaggttgggacttccccatgtgatcgtggaaaattccgtggagaccattctcaatgcactggagagtgccactcagttgcgccgtgtccaggtggaggaagcagaaaaacagtgcctctttaagactcaatcagagatgtatcaggcagtactggacttcacgcatgacgccatcctggccattgatgaaaacggccggattcaggtcctcaatcctccggcagagcggatcatgggctgccgggccgcggattccgtgggacagccggtggaggcggtcctgcccaatacccttctgccggatgtgctggagagcggcgagaagcagctggaccagatcatgcagatccaccagaccctgtgcaacaccaaccggatccctatcctggtggacggccagcgccggggcgtagtggccacctttcaggacgtgaagcagctgcagaacagcgaacagaagatccgcctcaagttgcacgaaaagggcttggtggccaagtacgccttcaacgatatcctgggggactccccagccatccgcagcaccatccagattgcccggagctatgccgcctcccgtgcctccgtgctgattctgggggagaccggcaccggcaaggagctgttcgcccagtccatccacaacgccagtgaccgccgggacggcccctttgtggccatcaactgcgccgctatcagcaacagcctgctggagagcgagctgttcggctatgaggccgggtcctttaccggcgcctcccggggcggccgggagggcgtgtttgaactggcccacggcggtaccctgtttctggacgagatcggcgagatcccccgggagacccaggtggagctgctgcgggtcctgcaggaaaaagagatccgccgggtgggcggaagccgggtgatccctgtggacgtgcgcatcatcgccgccaccaacaaggatctgctgcaggagaccgtggaaggccgcttccgggaggacctgtattaccgtctggacgtgctggacctgaagctcccgcctctgcgggagcggggtgacgatgtgaagatcttaggcctccatctgttccgccagctgcccggcggcaaggaccccatcatgcagagccagttcttgtatctgcttgaacaggccggtccctatcagtggtacggcaatatccgggagctacaaaactttgtggagcgggccaatattctgatgaggaacgccggagcctcctccgtgacggtgtcggatattctgcgccgccgcgctgagcctgcgccggaaccctgccaggaaacggaatcacgtgaccgccgcgccatcgaggccgctctgcacaaccaccccggctctatggcggatgccgccagaagccttggctgcagtcgacaaactctatggcggaagatgaaaaaatacggcatccaacggtgatcgtttcattttctgctgcgcctttaaccgtttgcaacacacgtttaacaaatcgcgttacactcccccggccaaacgccttgtctgcctattttcattcgcgggcaaggcgttttttgtgcatttttaccccctttttgtaaattttctacagctttttcaaacatttagtcaaatatatgaattttccccgaaggattggcacattttttgctatatctgtaataatagcttttgacgtcgtgggcgagctgcgtctgggcaggtcacaggggatcctgtggcaagactctactatcttttaggaggagattccatgggtaaaacaaaagtccaaaagatcggcttccttgtcggcatcgttgccatgctggtcatcggcttcatgccgacgcctgaagggctgtcgctggtggggcagcgggtgctggccgtcaccgtactgatggtggtcttttggatcactgaggccatgccgatcccgttcacagcgctgttgccgatcttcctgttcccggtaatgcaaatcaccggctccaagggacagaatgacatcacgctgttcgcgcactatgcctactccacctgctacctgctggtgggcgtgggcttcctgtccggcgccatggtgaagcacggcctgcacaagcgtattgctctgggcatcgtcagcaaggtcggcaagaagcccaccactctgatcctgggattcatcattgccgtaggctttgtgtccatgtggatgtccaacacgaccgccactgtcatgatgctgcctgtagctctggctatttccagcaccttgggcgataatgccgccggtctaaagaaagccatggtcctggccatcccctacgccgccaccatcggcggcatggcaactgtcatcggcaccaccaccaaccccaccggcatcggcctgatccgtgagaccattggcatcgacatcgactttctggactggatgaagatcggcctgcctttcaccgtcatcctgatccccttcttctggctctatatggtgaagttcttcaaggtcgacaagatgccccctactgacatctccatcgcccgcaggcagtatgaggaactggggcccatgaacaagggcgagaagtgggttgccgccatcttcgttctgtgtgtcatcctgtgggtcacccgttctctggtctggggtgactggttcccctatgccacggatgaaactatcgccatgttcggtgcaatcttggttatgattgcacctatggattataagaaaggtgagtacgtctgcgactggaagaccggcttcaatgacatcccctggaacgccgttattctgctgggcggctccatggtcatgggcaacgccttccgggatgccggttgcgcggagtggatcgccaatatgctctccggcttggcgggcatgaactccatcctgattgtaattctggttggtattgtcaccgctgttctcactgaactgactaccaacgccgtggtcgtggccgcctttatcccggtcctggccggtgtgggcgaggctatcggagtcagtccctttgccatgatgatcgcctgcatgttggcctgcaactttgctttcatgctgcctcccggaacgccccccaacgccattgcttatggctccggcgaaatcgagctgaaagatatgttgaaatgcggccttggcctgaagctcatcgctctgatcatcttccccatcgttctgtatttcatcaccatgggcatcttcggtgtcggcacggtttgaccgtccctggtacatctgtcacaagggctccgcacagtatgtgcggagccctttcctgtccccccgctcctccgctccagcgatccagctgctggagttcacaggcacagcacaggtgtgcggaccgatccacaccgtctcttccagctgtctcacaggcggcctcaggagaatcatagggtacatacaccccgagtacagagtctgtaatccccagggccagcccgtccaaagccctgtgcgtcagccctttctcgtgcgatccccctgtgttcttctctctgtacgggctctgcgtaagccgccgcagaatccccgcctgcatcttcttcgcccagccctgcagaaaaaccccgcccccttccatttgggaagggggcgggaaggagtgtgtgttagatgacttatcgctcaggcttgcagggagtctctttttctacatggatatggtggccgctgtatgtaccagggatggcctgcatctgggccttcgcagcagccagcagcttggagaaggaaatgccagtgtcgcagcccatctcattgagagtccacaccacatcctctgtggacagatttccagaggcaccgggggcaaaggggcagcctcccagaccacccagagcagcctgcaccttggtaacccccatatccatggccgccagggtgttggccatgcccaggccgcgggtatcatggaagtggaccatcagatccagaccgggatatgcgttcttcacggcgccgatcactgcgcgcacctgggcgggatcggcaatgccgatagtatcgcacaggcagcaggtcttcataccggcgtccacatagtctttcagaaaatttaccgcggcggagggattgtcgtatttcccctcaaagggacagccaaaggtggtggccagatccacgatgatgtccaggtcgggataggcagcccggatttccttgtacgcctccagagactgctcgtgggtgcggttgatgttggccttgttatggctcttgctgagagagaccacatagcacacccgccgcaagcccagctcataggcgttctgtgcgccccgcaggttggggatcagtgcgaacagatccatgtctggatatttctccagcaccacccgggtcacgtcagccgcgtctgccagctggggaatggccttggggctgacgaaggaggtatactcgatgtgcttcactccggcagccaccagttgatcgatgacggtcagcttctgctccgtggtgatcggggtgcatttgacactctggaatccgtcccggggccccacttcgatgacttcaacttgcttgctcatgacaggaaatcctcctctaaaatcagataacgcctttctccttcagctcggtcagtttggcctcgtcgaagtccagcatctcaccgtagatcgcggcattgtcctcgccaagcaggggcgccccctttctggggcaggacttggtgcgggtcagcttctgggccatggccgtgatctgcagcttgcccatgccgggctggtcgatctccgggaacattccgcggtcgccggcgatctgggggtccttcaccagacggtcaatagtgttcaccggacaggccgggcagccggcgtcattgagcatcttgtcgatttcgtcaatggtatggtttctggtccaactgctgatgatctcccgcagctcctcgtgatttgcgatgcgctcctggatgcctgcaaacttgggggcatcagccagctcggggctgcccatcacactgcacaggatcttccaaagcttggcgtttccggcggcgatgaccacgtcgccgtcactggccgggaacacatcatagggataggtggactcataacggttgccgatccgctggggatacggccggtagactgatagatcatggtgatattctccatagcggaggccacagagtccaccagtgccacgtcgaccttttcacccagacctgtcctctgcttgttcaccagggccgccagcacgccgacggtcaggttcagccctcccagcacgtcgcccatgggggtgccgcagcgggtggcagggccgccaggccagccggtggtgctcatcagtccgcccatggcctgacctacaatatcataacccgcacgcttgctgtatgggcctgtgtggccgaagccggagcaagcgccatagatgatgccggggttgatctccttcagcacatcatatcccaggcccagcttctccatggtgccgggacggtagttctcgatcaccacgtcggccttcttcaccatctccttgaagatctccttggcctcgggggctttcaggttcagggtgacgcccatcttactgcggttaaagttggcaaagtaaacgctttgatcattgataaaggggcccatgctccgactgtcatcacccttgccaggctgctcgaccttgataaccgtagcgcccatatccgccagcagcgcaccgcagtagggccctgccaacacgcgggtcagatccagaataacaatgccttccagcaggcctttttcgtgctccatgataaaccttccttttccgtcaataatatgccttcagaattggcctatcgctctgggggcgagaccagaggagggccttatcctatcgggatattaagcaatttttgtgccaacattttggagcagcccagacgtcgtaataccacagatatcggtctgtttttttgaaccgtccgctatcaagctgctaatttgtatcagtaagtattaaatgtaccgtaacatattgttacatcccgtaacacttcaagaagacctactgcggagccaaattttccggtcggatgcgcctatcgtccgcagctttcaactcctgagagcatggcgttcatgcgcctgggaaatgccacattcgctcccatctggttctattggcagtcatgccgatatctgagcaatgttccggtcgatagaatgctgctcctttattttacagtagatattgaaatgaagaaaatagcgcctcatccgccttctcccccaccaacctgcggctcttccttgatcattcctggaattatgtggtgccagacattgatctctctggctgaatgagctatcagtgtcgacaggttcttcacacagctcctctcaatttgcagcctgctgccggcaacatacaactgcatttttgacaaacttttcccgctgagatgggcgagcccttgccctcatttcccaaacttatcgggaatactttttccgctcgtttatagcggttttcggcgctttttaatttgtttcacttactctttgacgctcttatctccgctgtttccgagtgttccggagccgtatgtggtaatctatgtggtcaaaaacgcttcccgcccggtttccggtgaactgtcaccggggccggacgggaagcgttttgtgtttcaaatcgtctgcattgtaactctgcggagggtgttatgcaagtggtttctgcaagggtgcggctcaaaggttgagccgctatagacaaagaataggcaggaagataagcgaggtacttttcgtgctccctgagtataaattccttaatacaggcataatagtaagggatttatggcacagtctattgactattcccttatttcgtattactatttaagggaaagcgaatggaggtgagggaatgagaaccttcaattactctgcaattaaggaacagaagtgggactcggatgttcttggcctaattgcggccatatacaaggaagccggaaagcaagaattgtatttgaagcagcgtccggaggaacttgaaaagctcgtggagattgccaagatacagagcactgaggcatcgaatgccatcgagggcatcgtcaccacgagtacccgaatccggcagctcgtcgaggagaaaaccacgccgaggaaccgagatgagcaggagatcgctggataccgcgatgtgctgagtatcattcatgagagctttgacgcgataccaattacgcagaactatatcctgcagcttcacaaaatcctgtacagccacatgaataacccgcttgcgggccgcacaaaaagcgtgcagaattatatcactgccacctatccggacggtcatgtgaaaacgctgttcacgccgcttgccccttatgaaacgccggaagcgctggacagaatctgcgaggaatacaaccgtgtgattggaaatatggagctggagccgttgattgcaatcccggttttcatccatgacttcctgtgcattcatccgtttaatgacggcaacggaagaatgagcagattgctcacaacgctgcttttgtaccggagcggattttatgtcggcaagtatatctcacttgaagccaaaatcgccaaaaacaaggatttgtactatgatgcgcttgcacaggcgcaaaccggctggcacgaaggcacagaggatgtagtgcctttcatcaagtatctgctcgggacaattcttgcggcgtataaggactttgaggatcgcatggcgcttgtggaaaccaagctgcccgcactggaaatggtgcgcagagcaagcaagaatagaatcgggcggtttaataagcaggacatccgggagctctgcccgacgctcagcgacagttccattgagggtgctctgcggaagttagtcgccgttggtgaactgaaaaaagaaggaaaaggtaaaaacacctgctatttcagactgaattaaatttccgtcaattagagggccgcacctgttcatacgagcaggtgcggcccttttagtcgctttatagtagttggcgcacagtttaagggttgagccgctataaacaaggaatacaccaaagtctcctgccggaacacacacttgccttacccgaagaaatactgcttcatatctgagacagcgccatccttatcgcagaaccattcataattagagagacaatttcggcagtgagcaatcacatcgaagccgccgggtgaatgccagttgtcggtaatgctcatgatctccaatggttttccgcaggctggacatagtctgattttccttgccttacgagtggcacgctctctctgttctgtctcaagtgcatctaaaaggtcatgccaaagattcggattcggctcgtgttctgcgtaatcttcaagatgccgcctaatctcatcggcagccagtacgagaaacttatcatccagaagctgagtgtgacgcttgatataatcagcgactaccatgggcatacaagtattcctgcccatcgcataccgcattgccgacagcagaatcaagcgaaagtcagagtcgcagattggggcgagcagatcctgagggaacagcagaaactccttgccattattcatgcatacgcgcagcggccgctgttcttccgttaccagattcagtagactgttagcttgatccttcagctcatcaatggtgatcgattcgtagtcctgaaacgggtttacttcataattcatcatttaacctccaatcagtttgtcctcacgatgaggtgttggcattgtagctctgactgcccggaggttcaaccgtttcttttgcagctcgaaaagaaatccaatagggtcggaattcgtgcggatttatcattttcttgcttttcctgcccaaatgtgctatcattataaacaacgctgtcaagtgttggaataggccttggcagtatggctgcaatagaccgaatgctctgccaagtggcagagcatttttcgcatatcggtacggaggagatatttatgtctgtgagttataaaaaactctggaaactgctcatcgataaggacatgaagaaaaaagacttatatgaaaaggcgggtatcagcccagcatccgtcactaagatggggcggaacgggcatgttaccacggagattcttgcgaagatttgcgctgcgctggattgccggatagaagatatcgtggagattgtgccggatcctgataagagtcgttaaatagtagaatattcttgataacaaagggatacatatgggaaacatcattcagtcgattccggaagcaaagcttctattggcctctttacgctccgttggatatacagaggaaaccgcaattgcggatattgttgataattgtatttctgctaaagccaagcatattgatattatctttgagactgagaaaatgcgaattctaattcttgatgatggtattggtatgacagcacaagccctaatagagaatatgagaattgggtcttctgatccgtcgaaacagcgggatgatactgatcttgggcgatttggtatgggcatgaaaactgccgccttttcattggggaaaaggcttactgttgtaaccagatttgaggaatctaccagtaacgctgcatgggatttagacaaaatacctgatattgggtggaatcttattatcgaggaaagtgactcaatagccgagatttcatccaggcttggagcgcaaggtactgttgtttgtattgagaatcttgatcgagtaatcggttctttagatgaagcgaaggccaaaaagaagttttgcaaaacagcggaaaaagttgaaaagcatctcgcccttatttttcatcggttcattgaggaagatggccttgttattcgcatcaatggaacagagattcaaccatggaacccgttcgttatcaataataatgccactcaagagcttgcagatgaaactatatggtcagacgatggtgcatctgaagttgtaattcagccatatgttcttccccatagaaccaagtttgcctcggatgatgactatcaagctgcgggcggtgcaaaagggtggaactatcatcagggtgtgtatgtctatagaaatcgtagacttataatttgtggtacatggtttgattatatcaagaaagagccagcatacaatcttgcaaggattaaagttgatatatcttctgttagtgatgaagagtggaaaattgacattaaaaaatcaacagcctctttacctgggtatgttcgagacactgtggaacgggctattgatatttgtacggaggcgtccgctcgtgtctataactcccgtgggacatactcaaaatctaatataagtgcaccgaacctaagttatgtttgggaacagcgaaaaaagaatgggcgctattccttccatattaaccgtaaacatgccttgctcaccgaggtcaaaaagcatcttgacacagatggcgcagctgcgttgtcagcgtatttaactctggtagaaaattttgcaccgtttatgctgtctggtgtaacagactcgctgcaaaaatcgactgaaactgcagtaaataaagcctcacttgaatatcaagtggagatatccgaattaaaagaatacatcgcgttgtttctgtctcaaggatttacaaaagaagaaacaaggtccaccttactggatatggtgaattaccgtcatctccgtaatgagattattgagttgttggaggaagccgaatgataaacgtgcctaagggcttagccccgcatgaagttgatctttacataagtgccttcaagttttgcgaaaagttaattcaggaacagaatactgatattggcgctgcagtaacagagacaacggagaaatacagctttattatttcggataaagagttatttgcacagtttctttttagagaaatcactgcatataccgagccatcaataggtgttgtgtccccagaacttgatgataaaacttggtggagtaaacttaaaaaaacggaaaaattcatacctgagtattggcagcgatattatgactacttaaatagaaaaccttcttggagtttaactgcagtgcaggatattgattcgtccactgacgagataatgaacgcacttgcaaacccacgaagtggtagagcatgtgatcgcatgggcatggtctttggttatatacaatctggtaagaccgcacattacattgggctgatcaataaagcggttgatgcggggtatagaattgtagtagtgttgactggcattcataatagcctacgcagccagacgcaatcacgtattgatgaagaagttttgggctatgagacaagcttggaaaacttggccgatatgattagggaaccgaatgttattggtgttgggataggtgcgcacaaccgcgtgaaaacgatagtgcagtccattacaacccgtgatgaaaaaggcgatgtaaataaaactacagaaggcgtctccatggttccgccgtttattattgttacaaagaaaaatgcaacggttttgcgtcgtatcctgcgctttttccgaaaaaaccaatgtgccgaagtaattgacggcaaaaaaattataacagctaaatatccggcgctcataattgatgatgaagcagaccaggcctccattaatacaaacgatagttatgatgagaagggtaatcttcttgatgattataatcctacaacaataaatggactgattcgagaaattcttaaaacatttgagtgcagatcttatgttggatatacagctactccgttcgccaacatttttataccaccgcatattaactctgagcgatatggaacagatctcttccctcgcaactttgttttcagaacaccgcgggcggatcagtatatcggtgcccgagagttttttggattaagcggcgatgaaaatacgccggtaatgcctttgtgcagagatattatcgcgggagcttcttaccttggtaagggtactaaagcaggagatcctgttggcaacataccagaagagctaaaaaaagcagtgaaatgtttcttgatatccaccgcgcttcgtaattgcagaggacaaattaataaacccaatacgatgttgattcacattgtgcgtttcgtttctcagcaaaatgcagtaaaaaagaaagttgctgcatactaccaagatgaacttgccaacttcatccgatatggcgactcaggtatctatgatgaactgaagacgatttgggaaaatgattaccttgagacaacagctgcattacgttctcaattcagtaaatatatgtctgattgtgcagatattgaatgggatgatatttgggatgaaattaggagaatcgtagcaaagaaagaaattaaaatatacagtgtcaacggaaaaagcgaggatgctctgctatacaaaaacaacgaaggaaagccatttaatgttattgtcattggcggggacaaactgtcccgaggcctgacgcttgagggattaactatcagttacttcacgagaagctctaatacttatgatactcttatgcaaatggggcgctggtttggcttccgtcctggctatttggatgcgtgtcgcctatatacaacgccagggctaagaggacttttttctcacatttctatggcaaccgaggacttggctggacagtttgattttatgaatgatgtagatcagactccagcagattttggcctgcgtgtcgcaagtcatccctctttagagattacaagtaaaaacaaactaaagacgggtcttgaggtaaaaagagacttcagctgcaagcttagccagacacgcgttttcgatattgacggttcccaatatgaccgcaattttgcaacagttgagaatctgctgtattccatagcgggatgcagagtttcaagtgaacagtatgaagctcgtcttaagagaacgcacccaggtgatcattatttttggatggatgtatcggcttatgatgttgctaatttcttcgaaggctatgaaacatcgaaaacggctactcgcgccaatagtaagtatatggcagactatgtgcgtgcgatgaatgtagatggtcttggcggagtaaaaaattggaccgtctgccttataaatgtcagcggaaacggagagccattttctattgcgggacttgatgttggtgcgggtattctcagaaaagaaggtgctggtgtatcttcttttgagacaacctgttcaatacacaccatgacatccgctgggcacgagtattttgattacagtcaggcacagctcgacaaggaacatgagctccgagaaatgtactcggctgatccatccattaatcgggtcaacgaaaaaattcgaaaggaaacgcggtcttttgatcaaggattgttaatcctctatccaattgcagatgcaggaaaactaactgctcagaaagaagatcacaataccccatttggcttcgcagctgtgtttcctgatagaaaaggaaaaggtaatctaaagtcttatcggatgaacgatatagcactggagaaagataacgatgagttttacggctgacatctataaagaaatatgtacggatattgcaaaaaactctcggcctaattctgtttacgccatgagaatgttgaaactctccaacggaattaatattgcattctctattaatacacttacatacatgcggggagcgtttttctcagttgacgctaaagcaacggcaaatcaattccctcgctggaaaggcgttgacatcgtcatcgctaaacttcctgcctatggtactgatcaggagtatgtaaatgtaatgcagttaccaggaagtgcaactgatattttcgaaattgtcattgagaacttgcgaagcgaactggagaaatgctccgttgcagaagactcctttgcagttattgctgcggttttgaccaaatggagagaattcttcaagacagataaagatcttattatgtctgaagaacgccagcaagggctgtatggagaactgctgtttttagaagaatgccttgaagtatttggaccaatggctgtttctcaatgggctggcagtaatgacgagactcatgatttctacttctcgtctaatgcggttgaggtgaaaacaacttcttctcaggctccgtactatgcacatatcagcagtgaatatcaacttgacaacaatgatattcccggaaagttattcctgcgtttttatgcgtttcgaaaaagtcaaagtgcaggggataagctgccagacattatagagcggatccgtcgggcaatttcacatattccacagacagcacagaccttcacagaaaaaattcaaaagtatgggtactatgatgcggctgcggattattatggtgccggttattttgtccgtgatcaatactattttactgttaaagatggatttgcacgaatcacaaaagctgcggtgcccacaggtgtaacagatctaacttatacgattagtgttgctcagtgcatgccatttgcggtcaacaaaaatagcgtgtttgcaaagttgaagggaggggttaacaatgttgaatgataaaatattggagttttacagcgaactgcgcgaggaagtgcaagattatgtgaaaaccaacggccccgtctctgttaacacagcgtttaagacacttttcttgtcatatctgactgaaaccggagaaacacttgtttcggactgcactctcgttgatttcaaaaaagattctgagaatatgcgtttggacggttatgccttcagtgagtattttcgttcattgacgctactcgtcagcaagtatcaggctaaagccataccagataaaatcaaaaaaacagagcttgataaactgatgcgaaaagcagtaaaattctataagacctgccaaacgaattatttcgaggaattagaagagtccagtgatgggtatcaagcctatgagtttattaaggcacatagagcggatattgagacagtgaatattatttttctgacgaatgacgaagtggtacaattcgttccagaggatatttcttacggaaagatttccattaagtttgatgtctgggatattgaacgcctttatcagagtatattcagcggaacagcagtagaacgtcagcttgttataaagctaaagaagaagtatgctgctccgttgcatctaattaaagtaaatgggagcaatgatatctatgactgctatattggtgtcatttccggggaactactggctcgcatttacaaggatgaagggcaagaactaattcaaaagaatgttcgttcgtttctgcaagcaactggcaaggtcaataagggtattaaaatgtccttggcaagtagtcccgaaatgtttatggcatataacaacggtatttctacagttgcagatagtattgttattgacgaagcaagcagccatgacgatttagtgaccatcaccgaaattactgggtggcagatagtaaacggcggacaaacaacggcgtctatttataatgcatttcaagcaaaactgcctctggaaaaagtgcatgttcaaataaagctatctgtcattaaacagaaagagcaagcggatggtattattcagaatatatctaaatatgccaatagtcagaataaaatcaatatgtctgactttaatgcaaatgatgtctatcatgtgaaaatggaacggctgtccagaagtacctatattccagtagcaaaaggtaagcctaccgatcagtggttttatgagcgtgcccgaggtcagtaccttgttgaactgagcagacagccaaccaaagcggcaaaagatcaattcaaaagtcgatgccccaagaatcgctgtatttcaaaaactgttgccgcaaagtgcgtcatggcgtggtctggatatccatatatcgtaagcaaagggctggaaacaaactttgtgtttttctcagatatggtttccaaaggcgaatttccagaaccgtctgaacagagttacatcgaaatgatttcaagagtgattttatttaatcgatgtgatgatattataaaaagcttgaaattcggtggtttcaaggctcagcaagattactatactgttgcgcttatcgggaaatactattcggatcttataaatcctcaggaaatttggaacaatcaagatattaatgcagaaacagcgaagataatcgaaaccttggcttattttgtatgggagcatttccaaaatcccagtgtacccggtgtgaatatcggtcaatggtgtaaaaaagaggattgttgggaactgctgcaaaagcgctttgaagcacaaaaagataaagcaggagcaagataagatatgtacacagcggtagatctgtttgccggagcggggggactcagtcttgggttcatgcaaacaggaaaatatgatattaaagtggcttttgagaatagtccctatatgcaagatacatatcgcttgaatcatccaggcgtagaagttttaggtgatgtatgctcggccaactatagtgacattatgcgcaaatatggcgctattgatgttgtaattggtggccctccatgtcagggattttccaatgctaatcgccagaaaaaccatgcgattagccaaaataatatgcttgtgaagcaatatttacgtgcaattttggaactgcaaccaaaggcttttgttatggaaaatgtaagcatgttgagttccgaagtacatcgattttatatggaaaagcgcgatgaagagaccattgagcgctgcaacatcccagtaaaggatactcttctgcatttgctggatgcgaagtttatgttcgaaaaagcactgactattgtgcagtcggaaaaagaaatttcgaagtatctttgggcagaagaagattattacctgttgaatgttatttacaaggcatcaagaagcgccgctaaaatgcaaaaagcattggataaacataagaaaaaattacttaaaagagcagagcggtatttaacgattgcagagaatgatcatgtttttgcagaagcaaaaacagcatttcaggcggtagtggacttctatgagggaagactggctattgatagaataaaagataagattgaaccgtccataatgatccagcgaatgctgagcaaggctcaagaaatatttgagaataacattgttgtagacaaatatgttcaagataatggcttagccgcccaaatacgttcattcgcagtttatgattacctgaaaaaaatcctcgaagctccagaaaatgattacgtgatttatagcgatgttctttgcgctgctgattatggtgcacctcaaaaaagaatgcgttttgttgttataggaataaaacgtagtatttctgcaaaaattgctttgcccaaggggcattttgacgcagatgaatatcgtacagtaagggatgcaattagcgacctggaagatgtcaagccggttattgatcttgctgatgaccaaaatggcattgtactacagcccaaggaaaaccttagtgaacttgcttcatctttgcgtaactccttaatcctaagaaatcacatggtcacgaaaacaactgatactgcgatggagcgctttcgtgctcttaaacaagggcagaattttcattcacttaaagactctatgaaaacgaatacctatacagatgctgcacggactcagaatacaatctaccttagactaaattatgatgaaccaagcgggacagtggtcaacgttagaaagtcaatgtggattcatccaacgcaggatcgggcgataagtgttagagaagccgcgcgattgcagacattcccagatagttttgtgttctgtgggtcaaaggataagcagtatcaacaagttggcaacgctgttcctccaattatggctaagtcgatagcagaaaaactcgctcagattttggaaaagaatttagctggtcgtgaaagaaatggctgataatcactctaaagaagtccggagcatgaatatgtcccatattcgcagcacaaattcaaaaccggaagaaattgtgaggaaatatcttttttcacaagggctcagatatcgaaaaaatgtgaagaagctcccagggtgtccggatatagtgctgcctaaatatcatactgtcatttttgttaacgggtgcttttggcatagacatgattgctccagatttgtgtggccgagttcaaatcaagactactggagacctaaaatcctgcggaatgttgagcgcgataaaaagaataccgaagaattgaaggccttagggtggaatgtcattacagtttgggaatgtgaactgaaaagagctgtgcgagaagaaaacttaaatctgcttataacaaaaatccaacagagtaaaagctaacaaacagagaaatgttttgattctgaaatcttgcttcttgaaggggcatagttaacctgcgagcccggttgaagcggtaaacaacccccgcacttaaaactcaatatttacattctcttccatatgggggtatagctcagatgggagcccgcatcatgagtaccccacatcccaaatagcgactgaaatgcaatgcttcagtcgctatttttcttaaaaatttcagtagctattcctgctgacctgtggtatatgtttgtgctgcaaggaggcgagcacatgaacaaactgctgaaggatctgtacgactgcttctacaccccgccggagctggcggcgacgaagcgggaaatcgaagaatgccaccgcgcgctcattgaggcgctgggcaagccggagcgccgattggtgctgaagatcatcgatgccaaggatcatatttcggaggacacttcgctcgacagcttcatctccggatttcggctggcgtggcggctgtccgcagaattgaatcactatgacgatgagcgtccggcgcgctgccaagcggcagagaaaccgggcgctcgttttacgttcaaaaaggaggatgatgaacaatgaagaagcgcatcgtgacagctgtgattaccgcttgcttggccctgtgtgccgctgtgtggccgcagccagacacacgggaggaacgacccgccccaataccaacgcacgccgcagctgctccgaaaacggatgctgtgacaacggcagaaaggaaaaatacggaaacgccgcgggcagagccggacgaggagcttggcgccgttcctgtccccacaccggcagagccgacacctgcggtcgaaacgccgcagccggagcctgcgcctcccgcaccgcagccgaccatagagctgcagcccggcgacgaggtctatattccgggctttggttgggtaccatacgaggggccgaatcaccgcgagtatgccgcggatatgtacgaaaatggcaataaaatcgggagcatgggctgaaacaggagctgctgggagcggttaagctgcttgattacgaaagttgctgcaccgaaaagtggttggtatcaaaatgtgataccaaccactttttttgtcggtgtggaattgaaaagcgccatccggcgcacgatgaaagaactcatgtgcgcacctgcttgcggggcgatagtgtggggatttgtaatagaaaccgcggaaatcggcagtatcgtttctcaatttgcagttgcctattgcatttgatttcgatttatgttaccatgttaatgctgaattgttggactatcctaagcttcaaccattcgtatcatgagagtacgaatcatattgaacctatgtagtgatatagacaatttagcggacaaatgagtaaatcctcgaaactattgattccaatcaaattctcattatggaattgagaaagcagtttgctggttgactgtcgttgtccccctgttgtttcgatgctttgcaccacaaaatcgaaccggagaaagtgttctttcgtcgggtttgttttgttgcgtgcaaagcggtcttccggatgatcgcagtccacgcacgaagcaaagtgcgtgggcttttttcggttcagaaaggaggctgattatgggaaaggtatcaggaaaaacacataccaaagcacaactggatcactgggcaaatctgcataatcccaataacaaggcatatcaagctgacgctgacaatcgggccaatcagatgaatccgaaccacagatcgtaccagagaactcacaatgcaaaccgcagaaacaaagcgcattggatgcccgagtgggcgcctgactatccggaatacgatgattaaaattggaggtgcacggtatgtcaaagtacattttcgactacgatgacggcgacttcgccatgagcatttctgacagcatggcgatggactccgatgggaatctcatgatgcgcatgggagatcacatggcgatggacatggacaccggggatattcacatgatctcctcgtggcccgatgatgacgaggagtagagcataggcggcagctcagcgattgagccgccatagacaaggaaaacactttcaatccgggcagagaaagcagcgggacaggccgtaaaggcttgtcccgctgtctgtatcctatggcagatattcttctgtgatccgataccggctcatgccgaaggcgctgctccgctccacgatctccggcgggatcttgggcagatatttcttgctgaagctggtgtccccgaagtaggcgtcaaagcttgccaccggcaggacgacccattcgctatcatcctgacggttggcgaggtaatagcggatcagcgtacagacgacctcggctggaatttccttcggaagcgccgctttcactttctctgtcagttcaggcggcagctccggctcctctctgcgcagcggtcccagctccaacgcatcggcaaggacatcatcaaagcgcagtgtccaggcgcccttggtttgggacgcaaaaatcgggatctgatattgcatcaccttgcttcgccatgcggcggcaaactttgagcgaatgacctccacatacttgagcgaggtgctgcgcaccttttccgggtgcgtcagcatgaagtccgccgcacggagaacatgacggaggaaccagccgaccccatccgcatccaccagctccgggaactctgtatgcagctccgaaaagtccgtctggaactgccactccttgtcctgcacacgctttccgtcctctggcacactgcaccaggcgcagagcgcacggcgggcgtggtcgatccgattatgcgaatcacccgaaaggattgctccatcctccccgtggaacaggtatccgcgggccaggatggtcagaatccgagccattccctcaaactccaggatcgtggcaaaggtgaaacggcccagccatgtcgtatcgctcttcctgctggcggtataggaaaccgttccggtatatgcgcagaattcctcccgttcgttaatcatcccgcacctccagaacatttttctcgatatactccggcagtagatcccacagcaggtcacgtctgccgagagcgaccacatagcgcacggccagagccggtcttacaatcgcggtcaataactcccggcacttagccgtcaccgcatcacggtagctctgggaggcggatttgtccgcgaaggcgctcatcatggcggtgaaggctttcgagtcgctttcgcggaacagctgctttttctccctgccggtgttctcttcctctatatcacagacaatgtctccgaggatgcggtagccgccgaagcggaaatcggtcagcagatcgtaaatatcctcaaactccggcaccggcagccattcccgcaggaaacgctcccgtgcatcctcgtccatgaggtgccaggcctgctcccgcatggcatacagcagggcggacaccttttccggcggcaggctgccgaacagagcgtacagctcgtcaggatcgtatgcatcctcctgccctctggcatatagaatgcgctccacatcgctcttccgctttttctccttcaacggaacgcggcaggcccggatgcgggagaggcaggcatcgtaatcccgcagcagcgcatccactgccgccagcttatcggagtttaactgttccttccagtccggctgccgagcgaaggaaaacaattcttcgtccttggcgggctttgccttgatgcgcggcgtgttctttttcagctgctgtgccagatacggcaggcgctccacattggagtccacctcgtcccaatccacctttttgaaaaacgcctttaccttggccgcatgggtaggctcgtaccaggcgcgccgggtctccgcctcctctaccagcgtcttatatttgaggaaggcactgcgcttgacggtcttgtgggtcaggtactcatccagatcggggcggatgccgctcttagccgagtcgatctccagcccggtaaggatggctaatgtttccgtctcctcccggcagcgctcccgctcctcggcgtcggagttttcgttgtaggcaatgatgctgcgatccagcgcggcattgcagatctgaccgacgcgggaggaaaaggtgctgcgaacggtctcaaagcgtgcctcccagtcgtcggcactgcggatctggggctgggccgtagggatcatcagcagaggaatgttctctgtgttggtgagggatttgtgtttctcgtagcggtagaggttgtagttgcggcggacgcaggcattcaggattggatcagatatggtcttgatcatatcaccgtcgtagtcagcgccgcccagccgctccgcagccagcatattggaatccaccatcaccacatccgtcaggtgcccgaaatagtaatgccgcatctgctttctctcttccttcgcgtcgtagaaggaaagctgtagctcctcgttgcgggcaatgtgcggattgcgtagcagcgtgcaggcgtcgtcatgggcataggccgcttggggtgcatagaaggaactctccgggaagtggtcggtcatgacggtgctgtaaaacatccgttgcctgcgtttgcgcggcggaacagtcgggagcagaaatgccagaaagtccagaagatcaccggaaagataacggttgtctcccgccacgatcaggcggccgacggcgtactgctccacgatcttgtccgcttcgtcctccagccgcctggcatagaccggttcgttgatgaaatgcggattctttttcagcacggcggcaagaatctggtctttgccctgatgccgttcccaccagctgatccaatccgctttctccagaaagtagttctgccgaaattgcgggtttgcgcagaggttatagtaccgtagctccgtctgcttggtgagccaatttcgctcgtccgtctccgggctgtgatcccagccgtccggcagatcggcggggcggaactcgtcaccctgaatggaaacggtggtcagaaactgatagttcagctcggtggtctgttccggtttctccttgctcacattggtgatgtacagcgcatggcggtacttgcgaaacaccgcccggtagtcctcccagttcatgccactggcagtgagccagccgtatcccttgaacatgctcttggtgaggatgacgtccacatcccggacggaatgctccatgccccacagatcggtgatggtgtccgtcccgcagagggtcaggaagtctttgaagtccacctcgtgcagcatacccttgacatagggcatacggatctggaatgaggtgtggactttcttcccgcacagcttctcgtccacgacgcgggcatattcttttgagatcagcccctcgccgtcgaagcaggtgatttcgatgtcctcttttttctccacccggtgatatttgcgggtactgctctgcgttccgtcgtcctctacggtgatgacgctgacattccgctctgtgcgcgtaggattgtcgatgaccaccacccggtggggccggtcaatgccgatgccgtcaatgcggataccgctggacagcatcagtccgttgtaggcgtagagtttgctgagctgacagtcaccgatggtcatatccatcatgatgcgtcgacgcacggcgtcaaaaaaatcttcccgaatgaaggacagccgcgcctgccggctcatgctgcctgaccgctcaaaggcgagatatcgatgcgggtcggagccaaaatcaaggctcacgccctcgggacggaacagggccttggccttctcctgtcgaatcaggtgtttctttctggcaccgctccggtcgaatatgccggagaagtccatatagaaaatgacatccgaaaggtcggtcaccagctgcccttcaggtgctccggtgaaagcgtcgccgtgcagcacgcacatggtctgatagaacagtgcgttatcgtcctgctcatggggcgcggaaagtgatttgcatttctctgtctcggcggcgctgagatggaaggtatatgtcccgtcctgctgcctgccatagctgatcacggctctggcggacagctcgtagatcctgtatttcatcaacggcatcggctcacctcctgatgcttctattctatcatgaggttccaaatttgcaatatggatactgctcccactttttcagtgggagctttttgcttgcagctctcaataaaaattataaaggaggaatccaatgcaagaatccacattcaccaactatgaccagctgccgctgttcctcaacgcgaacacggtggcgcaggtgctgggcgtgtccatctccagcgcctacgaactcatgcacgagacgggcttccccgcactgcggatcggcagccgcatcgtggtaccaaaagaaaaattccgccgatgggtcgatgcgcagacaggaggtgatgcctgatgttccagcgctggcctaagcgggatccgaacaagcactactatctcgtcccaaacgaagtcttcaatctcggtctcacttctcacgagattgccgtctacaattaccttctgcgctgcgaggatcgcaggacctatcagtgccatcccagctaccgcaccatcggtcggtcggtgcagctgagcgaaaacaccgtgcgaaaatatgtggccgggctggaagagaagggcctcatccgcacggagcccagcaccatcaccacgaaggacggccgcgtgcgcaacggcagtctcatctataccatccgtcccattcaggaagcgctggagctgaactaccagcggcaatttctgcaggcggagcgtgatatggagcgggcacaggcagagaagcggctggtcgagttgaatcagcagaacaaaaaggaggaaagcgcatgatgcagcaacttgcgaacttcattgtagaccatgacccgatgatggttctccgtcgcacgcacgacacgatgcactacattcggtgggcgtggaacaaggatcatgccgaccccatcgacgaagaagagcttcgcctgttcctctgcgatgagcactacggtgatctgaccgatgagcaaaaagccgttgcccgtcggagccgggacgagatgcgaagtgtctatgcggagctgtgtgtgcgcttgctgcaaagtgagatcatgctggagcgtggcatggtgccggacagcggtacctaccgcagcgtgttttgcccggaagggggtgatgcgccatggatgcttgaccaagcgggatgactgccttttccgcaaagcgccgcagagcggctgaagtgcgcgtcagcgccgaaaattctcgcttcgagaatgacaagtttcgccttcgtggtacggaacggggcgattgccccgttccgaccccttcggcaggcgggctaagcccacacccctatcaacacaaagaaaaatgaatttaaaggagataaagattatgacgaagaacacctataatccctatgaaattatgatggacaagtacgataaggaagagatgctcagcgatgtacgggaagccatgctctatcaactcggcgtggatgtctcctgtgaagagttgaatcactttttcaccggcaagggcaaagccgcactatctggctgtgcggagtggcagcagtgctttgcagtcgaaaagatgctggagttctattatgtgcatgcgcgggacgagactctggctaagcagatcgagacgatgactatgctggcaagcagaggtaacgagcaccatggctaagaatcaatttatccgcgcccgcgttgccgggtgggaaaaggactgcatccgccgtaaggcggatgcagctcatatgaccgagagcgagtttgtgcgccgggcggctatggatcgtgaggtcacggtcattgaaggtatggatgaacttctgcgggagctgcgctatcagggaaataacctgaaccagctcacggtcatggctcggcaggggcgtatcacgcaggtgaactatgaaccctttacggaggtgtaccggaacgcatggcaaacattaaattcattgctgtctcacgcagtctgagcggtatcctggactatgttacaaaccgtgagaaaacggtggagcgtctcatatccggtgtcaactgcatggctcaaacagctcaggatgaattcgaagcggtaaagaaacagttccgcaaaacagatggccgcagctactaccacatcgtccaagccttcgccccggacgatccgctggattttgatacagcgcatgagatcgggttgaagtttgcggaatacttcaagggctaccagtgcgtggtggtcacgcatatgaatacagcgcacatccacaatcacatcatcatgaactcggtaaattttgaaaccggtcagaagtttcatcagagcgccagggagatgcagcaggcaaaggagtacagcaaccaactctgccgggagtatggcttgtccttcaccgagagcaaggcggatccgttccgtattcctgcttggaagaaacggctgtgccgtaccattaaggaagctatggagaactgtgctacccgtaaggagttcatcgcattcatggcggagtacggctacaaggtgcgatgggagccgaatcaaaaatacatcacctacaccacaccggagaatgtccgatgcagagacaataagctcttcgaccagacgcttctgcgcagcagcatggaagcctacttcgatatgggcggctgtgagtatctggaaagccgcatcgatgccaccgagtacggtgaactcctgcctacggtggacgatgccgtctgcggtttgatctccattctggatgcgatgaacaccggcgacaatgaccgcttccatctggaaacactgcatcacagcaagcaggagatccggcgtattctggaacgcggcggcaagatcgaccgcacggtggaatacgctgtagataatgaagaggaacaatacgagcagtaccacgggttttctatgcggatgtaatgacgaacaattccaaagttctgatagctatttccgcaaaagtgtggtagttgtttgtgttgcaaaaagaaaacgaattcaaaggaagtgaaatgcatggcaaaacgaagaccggccggcgacggcatggtgcgaaggcgtgacgacggccgctgggagggccgcatcgtcatcggccacaaggaaaatggcgaaccgctgttccgtcacatctacgccaagacgcaaaaggcgctgctggacaaactccatcagaacatcgagtgctaccgtgatgtggagctgaccgaggacagccgcatgacgctgagccagtggctggatcgctggctcacagagtacaaggcgggtacggtgcgccccggtaccctcgagggctaccgccgctacatcgaatactacatcaagccgcagctgggcgacaagcagatctccctcctctcccagcaggacatccagcggatgtaccgccgcctgaaaacggaggggcgcatccacgagcatcccgagatggggcatcagctctccgactccatggtgcgccacatccactccacgcttcacgccgcactgaaagacgcggtgcaggcgcatgtcattcccagaaatcccaccgaaggtacaacggcgcccaaacccaactacaagcccaagcgcatcctgaccggcgaggagctggatgccttccgcgcggtggtggagcgggacgaggtgtggcgggacttcttccagacggagctgatgaccggcctgcgccgcggcgagatctgcggcctacaatggagcgacttcgatgggaataccggtacgctgaaggtgggccgcactctccacagccagcggaagggcgagtataccgtcggtgagacaaagaccaatcaaggtatgcgtaccatcattctgccgcacagcgtggtggacatcctgcggcggcgaaaagcggatgccatcagccaatggatattccctgatccggtgaagccggaagatcccgtcgatcccaacgcggcgtatcgccacatgaagacgctgctccagcggacggggctgcccagtattcgcttccacgatctgcgccacaccttcgccacccatgccctcaccagcggcgtggacgccaagacactgtccggtatcctgggccacaccaacgcctccttcacgctggatacctacacccatgtcacctcagatatgcaaaagcaggcttgcggcatcgtaggcggcttcatggaggatattttcggaaaggagttgaaaccgtggcaagaaaacgaaaagccggagacggaacagtaaggcagcgcaaggacggtcggtgggaaggccgcatcgtcatcggctatgacgataacggctatcccaagacgaaaaatgtccttgccaaaacgaagaaggaatgcgtcgagaagctccagaagctcaaggtggattgcggcgggctgaagcccgaaaaagtacggtctgagatgcccttcggggactggctgacatactggtatgagaatcactccaagcctaagatccgcccaactacgcaggagacctacgagagccgcatccgcctgcatatcattccggagattggggacatcccgctgaataagctgacgcagaacgacctgcagcagttctacggtcggctcaagaaaagtggccggaagcgcttcaccgacaagtacggcgaagggctgtccgaccgaatggtgcgtatgtgccacgccacctgccgctcggcgctggagaaagcggtgcaggatgggctgatccgtgtgaacccggccctcggctgcaagctgccgccgaagaaggcgagggagatgcaggtgctgacgcgggaggagttgcaacggtttctcatccaagcgaagtttgagggctactatgaagtgttcctcctggacttagccaccggcctgcgccggggtgagctgatggcgctgcaatgggacgacctgaacttcaaaaccggtgtgttgaatgtgaataagcaggtctacgatgtgcgtggccagcttcagatcagcacgcccaagacgaagaactccgtccgcaagatcgtcctgccgcctgctgtggtggcggtgctgcgggagtacaaaaagacggtgaactcccgctggatgttcccgtcgccggtgaaggaggactgtcccatcacgcccggcgtggtgcggcgcaggttgcagctcatcctggaacacgctgggtgcaagcatgtacgctttcatgatctgcgccatacgttcgcgaccttggcgctggagaacggcatggatgtgaaaacgctctccgctatgctgggtcatgtgtcggcggccaccacgctggacatctacacccacatcaccgacgatatgcggctcacggctgccgccaacattgaccgtggcatcggcaaagcagcgccgcaggaggacgcttcagagtcgggggaggaaactgccccggcccaggcggaaaagccgagtatgaccgattttaagccctacgtgggccgcaagcgcaggtccggcaccggctgcgtcagcgagatcaacgaccacctcttcgagggacgctattcccccaaatggcccgacggcaagaaacacgcccgcaacatctacgcccgtacccgcgaggaatgtgaagagaagttgaaggtgttgatcgtggagatgaaaacggaaattgcggaagcacagcggctgagggatatagacgaaggtaatggaagtccgccagaagagcagaaaaagcggggaaagaagacataaaaaacaccggtaagagtgtgaagtgattggtacactatttactttacaacacaatgtctcaaattctacaccgcaataaaacaatgatagagaactgtttatgattctggttatgaatacgacctaactgataaacaagtgccctaacacacttgattgtgtgttagggcacttcggaaataatggggggacgctggtttcagctcggcatgagcaaagagcgtattccgcaaccactttggttgcggaatatgactgtgaattggtatttcatgtatgacagaattacagaaaattatatccccagtttatcaaagaggattctattgcgcttctttgcgtcatttataattttgtcataagataagatttcgatatatgcattcatcttatcattatacttataatacccaagtttatcaggtgtttgtgaaaaatcgtggaaatccaaaatctgctctaatgtggttgtgatgtcacacacggcatataagtagaatttggtgttttgtccgactctgattacacgtccatctttatccctttttttgttgctcctcaactgtgaaacatattcatataactgattgacaggattattactgctattatagtcatctcgcatcggacgtttgagttcaaacaagacaatattctcgtattctcgaccgtcattttcttcatcagaaacagcgactggagaatccaagatcattatgtctgttcggtcttctttcggattgttattaaacggaatatcggaggaaatataactgcaataggcgagcttctcatccagcaaccacaaattatgattgctataaggagtatccgcagaggttgttctcattggataaatgatattatggagaaaactctctttttgaaaatgcccatcatcattttgacgtattgcaaactccatcaagtcgaggataaccttgcggtgagcaacatattcggctaatgcggccccattagcgctatttattttttcgatttgcaatccaaatttctgtatgtactcgtctgaactgattacacctttattcagttcatcgagaagctgagtattttctttggctgttgttctatcgaactctctttttatacgatgtagttcatcatccaatttatcctcacttaaattaggcttgattttcgcaattgcctcaggtgtgtacttcaacagatgacgaaactgtggggcccgatgcgttacataatctgttattcttcgaattttttctgtggcaataggctgaaggtagtctttaagaaattcatttacttcgacgacaaccgctcgcatgatctgatccatagtaatcatgtttgccatgctatctaatgggccaccgtcaggaatgttaaaggaaagcctgttcatatcaacggcctcatcgaggtaatgccctctcaaaacaccaacataccagaatccactttttcgaagatttgtcgatcaagatcggtaatatacttatccagttcttttgtttctactaagcggttatgtgcacacaaatataatttgttgccgttgatagtggactcttcggcttttacatggagcaactcaaaggtttcatcattcaagacaatagtcttgctgttagcttcagatcgaattttctccttaaatatatgatttaagttatgagtttcatcaatatcctgcaggatgatttggggacaatcatcagaaatgaaatatacaagacaatgctggattatccgcatagcaatggtaatactgcgtttaggaacattatcggcatacggtttaatgtaattgagcaatctgactgtcgtttgattatcattatacccggtgcagtcggtgagggtatcattgatgccagaattagaaatggagaaatcaaaggatcgttttacatattcatcttcctcggaatagacactctctatctcagctttttcgaatgcaatcagccaagaaaaccgtccgacacccttgccgccaatttgggatttgtatgttgagtccgattccataaacgaagcaatatttgcttcattgaatccaattccattatcaataatttcgaaggactgaatttggggcaattcaccagtgccatcgagtacaaactgtccatcacgaagaattctgataattatttggccttcaaaagatggatcggtggatttccgctcaccaatggcatgaattgcattcacgatagcctcaaaaagcggcacaagtggctgatttttaggaagattaaagttttttacgcgaccgcgtatattgattgaaaacggtctcatatggtagcaacctccttgctgatagaattgctttgattggttacttggacgagtatcataggaaagcgccctatgtcatttacagtttccatcattaaagttttccaaatcgagtgccgtgcggctttttggccgctttacactcgaattgttgcttgacataaaataactcctcttttggaatcaaaaaagaccaaaagaggagttgaatacaaatataaaaagcaacagcttaaaatgatcgtatgggggactcgaacccccgtctacctcttagtcaaggaggcgctctatccaactaagctaatacggctaattggaatattaaaattataacacagtcaaattaatactgcaagagggaaaaatgtttgatggaaggcttttgtgtgggatggacttctgtatattaaaagtgcttccgacaggatttactaccgaaagcggacggttttgctgtagagagtaactcagaaattgcgccgcaatagacaaagaataagaaaatccctctgaaatcaacgatttcagagggattttggtccgagtagtgcggctcgaacgcacggtctcctggtcccaaaccaggcgcgataccaacttcgctatacccggatattcacttttctgtcatgataccacggcgagcggtaaaaataaagttttttctgtctgtggtcattcctgtggtcaaagccgcttttatgccgttttcaacgactgggggaaatcccacaaatgcaggtgtcacaaggctttccggcgtttcgccttgctccgtcccggataccgccacggcacacccaaagagttgaagaaaagttttttgtataatttcggtttattttctgacgtttctgctctggtttatttgctttccgtcactctttagaggtgctgtttccatgtgttccacaccacactgtggctaaaactgtggtcaaaacaccccccatgccttttacaagtaccgcatggaaacgataaagggcagggatgtttgcgttttcagatgtccacattggcgcctcatattcagagcactcggctccattttgcctcaacccacgaatcagaatttgcggaacataaaacaaaaacgatcggaactgcctcaagtatgaaaaagacgtcccacatagctggtcatggggaaacaggcatggtataatgacggtgaaaatccacatacccagaggtgagctcatgtaccgcatcgccgtttgcgaagatgacccgcgcaccgcggagcaaaataaaacagccgcctgtcatgtgctggagggaaaaggacgttcccagggacgggactatgacgtggaggtattccacaccgccgcgccgctgatgaagcggctgaccgcggacccggacgcctatcagctcctgctgctggacattcagctggacggggataatggtgtggagctggcccgcttcctgcgggaacataaggtcagcgcctccatcatctacatcacagaccaccccggtttcgcgctggacagcttccccacctacccgctggaatacctgctcaagccggtggacgaggggcggctggctgctgccctggactgggactggcagcggcggcaggaccggaaaaagcgcccggtgctgcgtgtgggcggtcggaccgtccccctggacgagatcgcctatctggagaccgccgggcgaaagaccgcggtccataccagagaggagcggatcgaatacaccgttcctctctccaaattaaaagaggaattccagaagcagggcttttgcctgagccatttcagctatctggtcaatctggcccatgtggcgcgggtagagcgggacgcccttaccctggacacaggggaagccatccccgtcagccgccggtattaccaagacttcatggcccgctatgtggaatccctgaaatagaaactccgctgcttcctgttggaaacagcggagtttttctatgcttccgttttggggagcagcagagcggtgctggcggaaaaggagtcttcgatggctttcaggaccaactcactgtgatacttccgggcggtggcccgtgcggacttgagtcccataccgtggagtgtgccgggcttggttgagttatatagcccctcttccgggtcgaagttcaccggggcgaaccgggcgttttctactcccacatacaggtattcaccccggaggtgcatggtcacccggagccacttctccgccccctcggggctttttcgttggcttccagcgcgttttccagcaggttcatcagcagggggcaaaggtcgctgttgggtatgtggagttcaggcggcagctccacccgtacctcggcgcggacgcctgtctccgcgccccgggccagcatggctgtcagaacggtgtccaccgccgggtggacggtgtagccattgcttcggttcagctcgggccgctgggacagggactccagatacttctggatctcccccatatctccctcccggcacaggccctggagggcggtgacatgatgccgcaggtcgtggcgaagagtctggatctcctcattgtgcttccgaagattttcatagttttcccgaatcagttccccacgttgaaggagaagccgctcctcggtgcggcgctgggattcccgccggaacaggtcaatgaaggcggccaggatgccggcagccatggtcagtgcggaccacgaccacagcaggaagcggggcaggccattttggaagccggtccggagatgaatcatcagctcacgcccccatgtgggatcggccgcagcatggacaccgcatacagccagccccattcccaggaccgccaggagcaacggggagaacagccagtagaagccgttcccccgctttctccaaaccagggagaggaccgcagcggccagcaggcccagaagccccagatactccgataccactgtcagcagagaagtggcagaggcccggcccagcagtgcggtcagaccgtggagagccgctgtcccccacagaatccagcgcagccgcccgttgccccggctccccagaaagagcagcagagaggtcaggcacagggcgcggctcagagcgttcagatccacttccgggtatgggagatagtgaccgaaaaagctggcggcccccagagggaccagcatgaggaaaaaggcggccaaagagaatatgaaaaggccaatgtcccaacgaccccggaagctctgccacaaaaacgcagtggagagcagaagccccagcacaaagcagagggccgcagggatggcagtccggaagctctctgccacgatgccgctctcataggcatatccgcagctcagcgtcaccgtgcaggggtaaacggtaggctccatctccgggatctgcttttcccccaggccggtggactgggcaatggtcagggttttacccagatagtccgggggcagggtgatctccaccggctccagccggtcccagcccagcatgggcagcgtcagctctcccaccccgccggattgctccggacagtccgtgtagaggcgctccccatccaggaacaccgccacgctgcggttgaccgtgtccagatataaaacggggctttccacctcctcggtcaaaatccgggaaaagtaaaaggtctgccccggcgcggaaagacccgtgtagccgatgtccccatcgggcagcaggtctgttcgctgttgcccctcctggatatagacctcccactggacggtttctacggacaggtcaaaggtctgttccgtcatgggctgggtaaagaacagcagcgccgcagcgaaaaatccgcacaggagcagaaccataaacgccgccgcgccccgtatgatccaacgtctcattcagcccgccctcccatctaacgtgtttcctattctaagagtaacggggaatcttccttccgtcaagggtacgggcttaccaagtttgcaggaaaattgaccatgtttgcaatccctattgaaacagcaaaatgtttcggtatagtgataggcgtaaggaactgtgcaccggactaaaggactggcgtacagagaagaattgcaagggggtcacccccttgcacgggatgaggaccatcccgtgcaaagatcctcctgcaaagcgaagggagagtttctatgagaaagaactggaaacgatggatcgcggggctgctcactgccgtgatgctggtcaccatgctgcccacggtggcctatgccgcagttggcgacctgctggacatgagcggtgtgcagcgcaccgccctgctggctgcgctggaggaggtctacggcgacgacgccgaggcgtatctggccattttgaagcagtatggcctgatcgacgaggacggcaacatcgtcaccgacgagaagatcatcatggacgggcaggcatacaccctggatgagatcgaggctatcctggacgacccggccaccgaccttaccaaagtggtggaggtggacggcgactatctcaccctggccgacctcaagaccgtcgtggagatcgagcggtatctggcctatctcaaggccacctacttcaccgagcaggacctgaccgacgagcagatcgacaacttctacgacttggcggaggcctgggccaacggggatatggtgatgctggccgccgatgccctggagggcgtgggccccgccggggtggaccacgacgtgcggctgaccgtcactggggcggccaccgccgaagaaaacggcgagtataccgtcaccgtggaggcctcccggtccgccgcagatcaggagatcaccttctcctggcggacagtggacggcagcgtgaccgccgacattgacggcgaggagaccgttaccatgtaccccggcgagagcaagaccctgaccgtccatgtgggcgagaccccagagcgcgtccagggcacgggaaccttcctggtgcagctctatgacctgaaaaacgcccttctctctgacggctccacccgctgggagcagaccgtgacggtagatagcgacgactatttcaaatactattcccgtgtctcgaaaacgctcagctatgagagacgagagcatggtgttgagactgattgggtcgtcgcaggcggagatgaggaaatgcgggaccggatccgggatggcggcaaccccatgtttcttgcggataaagaaacgctttctcttgaagggatgtcctccggaaactatttacgcatatttgaaagcggcggcggtagtttgattgccggcaattttcagtacacagttggtgctttagggtggttttttgaccccggttcctcgcgcccgatcgccgaggagcggccattctcctatgaattaaagatcgatgatgaagtgctccaggcggacgacaactttactgattgggtcgtagaagagacttacttgcttccttctatcgggttagaggctttccccacacaaagcgaaaatctggattatgaggagggtgatgagatccccgagcacacgatggaaatgaatatgtccggatattaccgccggtatcagaccagcagtggcagcgaaacctcattcgcttttgatccatacctcgaatatcgcgcatcctactacatgcaggagaccaccaaggagaccaccgtctctttctccgccccggcgggcacctactacgccggacagcaggtgcccatcgtggctaccttcgattaccccgtgaagatcaccgaggacatgaccatcacggtgaacgacgatcaaacactgaccccagaggaggtggaaaccaccggcgagagctgcaccttcctctatcccgtgaccgagaccagcggcggggccatctccgtcactgccgccaacttcgtgggggatgaacccacctgccagctggagggcgccaacaagctggagttgaccatctcccgggggaccgacgacctgaccggcgtgacactggaatctctggaccgggaactggcctttggggcgcccacgctggcggtgcgccaggagcagcaggggcagaagcccgtgctgaccatcaccctgcccctgactggaaagccctatgacaactgggtgttgaatgaggtgacggacctgaccaccggcatcctgcccgccctcaaggcagtgctcagccagacgggggacacccagtatgacttccgggtgaacgacccccaaaaccccacggcgctggtggcggagatcaccctgccctataatacctctgtggaggagttcaccggtcaggtggacttcctgctggacggctatgtgatgatcggctggggtcgggagtacaccctggacggctccaagccggtgggtgcctttgacggcggcatcaagcttacccgcacgaacagcaagactggagagcgcgaggaacagacaagcggcacagtctattttgacttggcggaaatggcggattgggagatgacgctgtccttcaccctgaaggaaggcgacttcacctggggcgacgtcactaaggtcaccgcgtacccggaggacaacaagccggaggggatcgacaatcaatttcactttgcatgggaatactccggccccgtcacggtagtactcaacgaggacggcagcaccagctttatgctcaccggggaaacaggatatgccaatgccagactggtggccctcaacggcgatatggaggatgcgctgcttggaagcgtcaccctccattgtgaaaactggggaggcgggacagggaacgcttttctccagattcccgaaagcggcagaaacatctccgtccgtgaggggaatgacgcccggatctactggagcagcaacatttgcgccctgaaccagaacgctggggaggacggagcctttgttcccaccaccttcacagtgcagctgggtacgctcaatttagaggatgcagatccaacggtagcggttgtcaaggagtggacggtgacgaccgatgagaagaaccccatcctctccgcctttaccattccgtgggatgaagggctggatacattctacaatgaggaaagaacggggctgatcgttgcctgtatctctgcggaatatcaggaaaagcggctcggcacctatatcaacgagaatggtgtaccggagatgggggagggcgaggagcctgccattgcctacatcacgctgctctcaccgcccgcgtccgtcaaactggaccagcccgcaggcggcctgtaccagaccgatggcggcgggaacggcaaggacatcactctcagctggacggcagacaacctggatgtaaagaacggcggcggacagtttgaactgtacatcgccggtggcgaaaagaccatctcggaaaccgacctgacgggcggggtgacgcaggatggaaatacctattcctacaccctgaatgtccctgctgtgacgccggagaccggcgaccccgccagctaccgggacgcctataccgtcaccgttaaggtccagaacgccgccgacgccgcctgggcctatgacagctatgtgctctatgtctactcggaggacatcctggagatcctgctggaccacgacgagaacaccggcggcagctacaccatgtccaacgtggaaaaaatcaagaccctgtggggcgacggcggagagaacggctccaacgccatcgtggccctccagcgggacatcgccctgagaaacgtcatctccatcaactacggccagtatgcctgggcggagctggctgaccagatcgcctgggcctccaacgacagctcggtggcctccgtcaactaccggcagggcactctgtatgagaacatcgagaacttctcctacaccacctaccgcccctccaccgacttcgtcctctccggcctgaaggacggcgaaaccaccgtcaccgccacccacggcaagctgccggagatctcggacagcctgacggtggatgtggaaaccttgcgggatcagctctacctgttccagtgctaccccaagacggagaccaccctgacctatcaggtgtacaccagcgccgccaaaaccgccaccgaggaatacaccctgaccaccaacgacaaaggcgaggctgccatctatgcgccccacggcatcgccggggacatctactgcaattccgtggcggatgatggggatgacgaggacgttatcttcctgggcgtcatccgcagccagagcctggtgtcctccgaggccgactccaccaagctgcagctctacccggtgaacaccctccagctgcgccgggcggcccaggcggaaatttatctaaaaaactcggacggcacgccctatgaggggcaggtcaccttccggggcggcgtgtaccggggcggcgagtactgcacgggcgacagaaattctgcggtgcagtttggcctgcagggtgagaaggatccaagccagtggaagcccggcaacacacctcaaacggtcagcaccaatgacgagggccgcctgctggtgaacatggatcttggaaagttcaagaccgctgacaaccagaaggaggtccaggcgggcgaggcgctctactacctgttccagctggagtacggcgacgggactggtgcggaatattatccaatcatgctgcgggtggacgccaacctgaacctggacgatgtggcgatctccggcgacagcatcgtggcctgggagaagaatgagagcgggcagaagcagccctatatcgcccagcagaccctgagctacagccccaagaaatacgccagcgtggccgacatccgcgggaacaccggcaacgtgggccccagtgataccttccccaccgcctatgtcaccacctccatcatgtggtggggcgacgagcacgccaaggacctggggcgggctaacaccgtgatgctccaggacgccaccggcaagaccccggaatgtcagaccagcgagacaaccacatatcccttcacggatctggccttcaccgagaaccggatgaccatggacaaggatagcatggaggagtggggcatggccgcgggcgagagccgcgggatgcgggccgtcctcagcgaggacgggaccaccgccagccgcaccatcagcctgcccttccagatggtcaatatgatcggcgtaccggaggcggaggcctccaatgccctgaccggagccctggccgacgtcaagagcggaatgaccgtggatgccagcggagacgttggtgatatgggtgacggcgatatcatgatcgagggcggcatggatctgctcagtgacgatgccggctacgaccccgagaaggacaagttcgccgtgcgcctgtacgccaccagcgaccccaccgtgttccgcgccctgttcggcgtgaacatgggcgatctggagcccggcgtctatcccgagtatgacgacccggacaacatgaccttcgtccacggggacgcctccaccggcaagaaccaggagctggaagcccttcccggccccatggacgtctacagcatggtcaagggcaaatacctgagcgccgccaaggaggaggcccagcaggccgccgccggaaagggcctcatggggaccagcatggcgctgggcggctacatggaggcgaatatctcctacaacagcagcagcggcaagtgggagtgccagcccatcagcggcggctttaacgtaggcgctggcctgaacttcaactggaacttcaacgccgtcgtgggcatcgttcccatcaccgccagcgtcaacctgggcggcgcgctggaggtccgcatggacatgcagcagggtaactattacgaggtgacctccggcatggacggtctgaagaacgccggcgaccagagcgccttcaacaccgccctggccagtgccagttataccgacgccaccggtagcgattatcttaccaacctgcggatgtacttctatatcagagccttcgcgggcgtgggcttcgacgtctcagtggtggcctttaagatcggtgtgttcggccagctgaatttggatatgcagtacaaatggctcaaccgcggttatctggaggaaagctcgaatatcagcgccgtggggccggtcagcagccggacggacgacgttatacagggctccaacctgtctgtcagcggctccaccggcattgagttcgtattcaaattcctgttcatcagctatgaaaagatcttctgctccatcggctttgagtcggagtccgatgatccggggtggaggaccatcgaggagatctggaaagccaataagaccatcaacggcaagcccgtcacccgtatggccatgcccaacggccaggtgatatacgccgtggacctgggggcgcaactggaacgccgggactatgtggacaccgccgagcaggagtggctgggcggacggccctccatcgggctgttcagcctggacaaggatcagaacgccacactggcggagaccctccagatcggggcctactcctacgccaacccggtgctgtccgacgacggtgaagtcatgttctatctcagcgaccgggaggacaacgacccggagagtgcgttggacatccgcaacactcgtgtggccgtgtccactaagagcaatggtcaattccagcagggagagcgcttcgacagcaatgatgaagtgtccaccggctacggcgacagcaatgtgaaggtggccggctctgacggcagttacgccgccgtgtgggtccggcagacagaggacatcaccgaaaatgtggtccccggaactgccctggacgatggtcagcagatgctccagataaattccaccgagatcatggccgccacttccacgggcggcagcgactggacgctggagcagctcaccgacaacagcacccccgacctggcccccgtggtggccgccagcggcaatcgcatcattgtggcatggcgtgaggtcaaatcctccgacgcctccaatctgaccaactttgaccagcaggacgccatccggtatgccgtctgcgagaacggccagtggatacgggatgaagatgtgttcgggaatgaatacgtcgccgcccagaccctgtatgacggcaccggctccacggcctctgtcaagggcctggagatggccatgctggaggacggtaccgccgctgtggtctataccctggataccaattccaccaccgagaacaccaccgactgggagaccgttgtggccattatccccgccgtggacggaacatacggtgcggatgatacccagagcgaagacctggtgcgcaccttccgcctgacttctgacaacaatctggacgaaaatccccagatcactactgcggagtttggggacggcgaggagcggttcgtggtggcctggcacactgagcgagccatcaccgacgacccgaacggcgagactgagtccgatatccggctgtccgttatggacacggacggcaaactttatgagaatatgcccgagtccctgagcgtggctgccggcggtgccggcgacacaatcggctccaacttccgcttcgcaaagaacacccaggacatcggcgacctcgccatcctgtgggtggactctgtcagcggcgagaccgacgagaccacttacgactcccttgcaggtgcggtatctgccagctccactaacgtgggccacgatgtgctcaaggcggtcaagttcgtggaggacggcgattcctacaccctgtccggcactgtggaagttgcggagatgcaggagggcaccctcatcgaccacttcgacgcttatgtcaacgatacgagcacgtacgagatcaggtcagtcatcctgggtactaattacagtgagactacagagcgtgaggtgactatttccgacggtgagaacgatgagactgcgaccatcactgtggccaaccccgtcagcggaatgtataccgccacggagaagttcaccaaccagatccaggagtcggcggtgatgctggcatatgaggagctctacaccaacagcgacatcgacgtccagttcaccatccgcaacaccggcatggacgccattaccaagctggagatcatctcggaaaatgagagcgtctataccagcggcgacacttctctgaacctgatgcccaaccgggacgtcaccgtgacggccaagttccccacgggggaggccattgagaacgcgaattacaccatcaaggcaaccttcaagaatggtgtgaccgtggaactgcccggcactctctatctggacatccccgacgtgggtatctccaaagtggagaccgtcaaacaggccgacggcgtacgcaccctgcgctatgccctgcacaaccgcctggccgccagccttgcagacgagaaggataactggcaggtcaaggtgggcttctacgccgaccagagctgcaccacgattctgaagggcaccgatgggcaggatctgatcgataccatcacggagacggcagatctgtccctcatcgacgccggcggttacagcgcggaggtcacgctgcctgtagcagagtacatgaaggaggaaagcggcgcacaggcggagatccccagcaccggtatcccggtctatgtcaaggcctggatcgaagcccctgtggaggatcaggccatgcgggcccgaaccggttcctacaacagcgtcagcgagtatttcaccgccaacaacaccacctctctgactctgagaagcctggctgaggagcgggatgagccggtcaccgtcatctacgacatgagcgttgccaacggcaagaccattgtgaatacaaaggtgcagtacaattacctcggcggcaccaccagcggcaacctgatcgtcacgctactggacgcccagggccagcccatcgccaagcagcagagctacaccaaggcagacggtttgctgacgctggaaaaagagggtgccgcaacccagacctttgagttcgcgggcatcaccggtgctgccggcgtccgggtggagttctccgacctgattctgacggacagtagcgtggaactggaccatatctccatcggcggccacaccgctgtcttcgactcgagcacaaacacctatacggtcgatgctgtcggcctgaccaacagtatcctggagatcgcgcccaaggacccccagaacgcaacgatcaagctggacggtcaggattatgatgtggatgcctcgcatgccacccagcttgcctccggtactaccacatggaacattacagtctccaacggcggcaactccgcaagctacacgctgaagctgaccaacaatgccgattttgtttctgtcaccggagtgagcctgaacaagaccagcctgaccctgacggagggcagcacgagccagctgacagcaactgttgagccaaacaatgccacgaacaggaatgttacttggtcttccagcaattccaaggtagctacggtggacggaaacggaaaagtcactgcccacaaagcgggcaccgcgaccatcaccgtcaccaccgcagacggcgataaaaccgctgagtgtaaggtcacggtcgaggccggaggtgcgccggctgtcaaagtcgacagcgtgagtctgaaccaaaccagcatgaacctgacggcaggcagcacgggccagctgaaagccactattagccccagcaacgccaccaatcagaacgttacctggtcttccggcaatacctccgtagccacagtggatgccagcggcaatgtcaaagccatccaggcaggcaccacgaccatcaccgtcaccacagaggatggcaacaagaccgccacctgtgcggtcacagttactgcagcacctatcaatcctgaccacggcggatctgggagcggcagcagtggtttgcccagctatgtagtggataccgctgctgatatcgaccatggcacgatcacagtaaagccaagtcgtgcggaaaagggcgacacggtcaccatcaccgccaagcccgacaagggctatcaggtggacaaggtcaccgtcaccgacaagaacggcgacacggtcaaggtcaccgacaggggcgatggcaagtacaccttcaccatgcccaacagcaaggtgagcgtggatgtgacctttgtacccgaaaagcagtggacaaatccctttgtggatgtggcggaggacgcctggtactatgacgcggtgcggtatgtcaacgagaacagcctcatggccggcaccagtgccagcaccttcgaaccggatctgaccaccacccgcggcatgatcgtgacgatcctctaccggctggagggctcccccaatatcgaaaatgagatctggggctatcccttcaaggacgtggatgtcaatgcttactacgccacggcggtctactgggcgaggatgaacggtatcgtggctggatacagcgacgagctgttcggccccaatgacaccatcacccgtgaacagatggcggccatcctgtaccgctacgcccagtacaagggctgcgacaccacagccaaggcggacctgagcaagttcgcagacgccgcacaggtcggctcctacgcggtggaggccatccgctgggccaacgcagagggcctggtctccggcaccagcgataccactttgacgcccggcggctccgccacccgggcgcaggcggcggtgatcctgacccggttctgccagaatatcgtaaagtaacccgcgcaggaattgcgccgtataaacaatgaaaaggcaggcaggagagcgagctctcctgcctgccttttttctgagggtgatagtttgaaatcccctaaactgtccgcatgccttatcaccactgatccctctgaaccccgcttagatccggctgtgcattttacgattcacaggaatagtgaatcggcaaaatcactcactcaaggtatgttcttctgtgcagaactctaaattttgttttcgagcctgctcactcctctgttttgttgcctgtatattatgagggcgtattatttgttcctattttcatttgtgaagtggcctacttattgcctgtatatagtgagaggctttttgcttctcacacttaaggaggtgttggccatgaaagaatcaggctacaaaagctatgaggacttgccgctgttcctgaacgcggcaacagtggcaaaggtgctgggggtgtctccctcatccggctacgagctgatgctcgtcgtcgcaaagtccactccgctccacccggcatatatgccgggtatacgctctgctcccttgctcctcctctccccatgaaaacgcattgcgttttcatgggggcctcttatggtttcccggtgctgaagatcggcagccggatggtggtgccgaaagaacagttcatctgctgggtggaggagcatacgggaggcggcacatgaagtatgggatcggaaactatttctctcttccaaacgagatcttcctgctgggtctgagcagcggcgagctggcggtctacagtttcctgaaacggtgcgaaaatcgaaagacgcatcaatgctggcccagctacaggaccatcgggcaggcagtgcgtatgagcgagaacacggtacgcaagtacacactgtgccttgaggagcgcgggctcatctccaccgagccaactgaaatcaccaccagggctggtcagaaacgcaatgggaacctgctgtacacgctccgtccgatccaggaggtgatagatgaacactacgaccggcaactggatcagctggagctcgttgcggcgcgtcagcggacgacagcggcccaggccggcacgtgaccgcctgtgggccgctgtgtgcggcgattgcggcatgggcaggaacagacactcccgcaccacaaagcgcggtgtggggggctgtgtgccgcaggtaccgggatcgcccggaagccaaaatgagcgggtgaaccgaggggacgaaaatcgtgcaggataaaggccgggggtcgcaagcgccctccggccgggtcacaccgccccgcaacgcgggacgggacagtggtttgcggggagttgcctgcgggggtcataggtggtcggtttggctcacttcgggggtcacaggtggccggaatcagaggattgcgccctcaaatccgcatgaaatcagggttgtaagggtgaacccgcgggggcaccttggggatatcggttggttttatcgcaaatccaagaagtgaatattcggactattgccccttcaaaaattgcgctgcaaaacaaagagaaaagcctcccgctgctacgggaggccaggcatttacagcatatgaaattcgattccttgatgtttcggcgtatcatttggggagagtttcatgacgcgcgcccaagtcttgaccgtctgcgcttccaagaaacggaccaaagcatccagagactcctgttcatcatactgctggagcgcctcatagtatgcctttttatcttcctcataaatgatcatggggggatagtcgttgatcatcagccagtagttcaataatgtccgcccaacgcggccgttcccgtcggcgaaggggtgaatattctcaaaacgcgcatggagatacgctccggccttcagcggggctttcggacctacagagttgacttcaccgatcagttctgccaagtcaccttccacttcttcagggtaggagccgacctcatggatgccagtcacatagtcatgttttttgaatgtcccgggccgctctccattgaccagataacggcgcgcatcgtaagttccctccgtcagcgcgcgatggatctccaggatcagtgggagggaaagcggctccttaacaggaatcttctcccggaggaagtcatagcagaccttctgattttgaagttcaaacagcgtgcggggatcgccggtatagccgaccacccggccgttctcaaaaatctcccgggtgtcgtggtaagaaatcgctgcgttttcgatcttcccggagttgtacgcgaagagaatgcggaagttgtccaggcgcaggtccaagtcttcgcctgaacggacagcccacatttgccactgttttttcacctgatcgtatagatccatgcggccacctccgctactttatgaagacagtataccatatattttggtttatcacaaaaaaatttttgattgccactgtgttcgctaccccaaatgataactttttgataacagttcgccgtacccctggatagttttctctttctgcggtatgttgtgtcgttacaaaggaggtgtatcatcgtggcaaagcgcaggccatccggcgacggcatggttcggaagaaggaagacggccgttgggagggccgcatcgtggtaggccacaaggccaacggcgcccccatcttccggtatgtgtatggccgcacgcagaaggagttactgagcaaactccaccagagcatcgaaacctatcaggatgtagaactgaccgaggacagccgcatgacattgggagagtggctggaccgctggctggatgaatacaaagcggggacgatccgccacagcaccatgtacggctaccggcagtatgccagactttacatcaagcccatcctgggagacaaggtgatctcccgcatcacctcgacggacatccagcggatgtacacaaaactgaaacgggagggtcgcatccatgagcatccagaatacgggtatcaactctcagacgccatgctctcccgcatccatgccatgctccaccaagcgatgaaagacgcggtgggcgcacacttaatcgccaagaatcccaccgagggcacggtggtccccaagcccaactaccgtccaaagcagattctgaatgaggaacaattggacactttcatggccgcaatcgagcaggacgaggtgtggcgggacttcttcttcaccgagttgaccactggcttgcgccggggcgagatctgcggccttcgatgggaggacttcgacgaggcggagggaactctcaaagtcaaccgctccgtcagcacccgcaaggcaggcagcctggaggtcggagaaaccaaaaccaacaagggccaccggagcatatccctgccggacagcacggcccagcggctacgggagcggaagaaaactgccatcagcgattggatatttcccaatcccttgcatccggaggaagcagtcaatcctggttatgcctacaatcggatgaaaacgatcctgaaaaataccggcctaccaagtattaggtttcatgatttaaggcacccgtatgtcaagcacacgacaaaaatttttagcttgcgctcgatggcttttcaagcgcaggcttatcctgatgctcggcgaaaaactcgcggagcttgtcagcttcatcggggaggacaaagccaaagccctgtccgtccactctgcaatagaaagcgattttcatgactgccacctcaatcaaaaatgtcctggattttgtatgcgatctcgatgcgcttatcgggatataccagcacccggtcgatcaacagctcggccagctcggtggtcagcgtgtccgcatcgaaaatcgccttggacgcttccttgcggctgtcctgccgtgcctgttcgtcctgcttctgtttcgcctgtgccaatactgcggcataggcgttttttgttttcagcagcagctcgttacacgcggccttttccgccttgtaggtgttaaggtcaatctcgcccataagatagtgttcgtaaagtgtgcgcttgccgtcttgcagcgtctcgatctgctgctcatattcggcgcgttccggtacggaggcatccacccggagcgaaccgtccggggcaaacggtgcggcggcttccatctgctttttcagcgtcaggaataccgcttgttccagctctgcggcgttcagacgcatcttgtgacagcggctttctacgtccgcctcggaatggcggcagtaataatacgaggttttctgcatggtgcgggacagcgcatgaccgcagcagccacagaaggctttgcctttcagcgggtagtcccgctttttcttgtttggctgggaaaagcggagctggctggcctgcacggtatcaaacacggctttctctacgatggccgggtgatggtcagggatgatgtaccatgattctctgtccttcaggtggcttctggtgccgcctacttcgagaaccgcccgcttgccgatcacatacacgccggtgtagcgttcatcctccaaaatgcggagaatagtggatgtactccaaatcccgtgacagcgggaaatatcatgggtgtgattgccgtgcgcggctttgtactggccgggagtggggatgcttctgcgaaacagctcccgcgtgatggcggtggcgttgatgccctcggcggcaagctggaagatgagctgcacaacggcagcggcctccgggtcaggctccattctgccatcggcgcttttgcggtagccgtaaggacaaatcttgctctgatactcgcctcgctgcatcttggcgtactttgcgctcttggtcttgatggacatatcgcggctgtaatactcactgatgagatacttgaacgccacatccatgccgccggtgtcgcccttgaatttgctgctgtcaaaatcgtcgctgatggaaatgaagcgggtatggaacagtgggaacacacgctcgatgaagtatccagtttcaatgctgttgcgcccgaaacgggaaaaatccttgacaatgatgcagtcgatctgattggcccgcaccagctcaatgagcttctgcacctgcggacgctcaaaatttgtaccgctatatccgttgtcgatgaactccatgatctccgcgttcagagcttccggcatggaagctgcgtactcatggaggacaaggctctgattttcaatactcagactgtcgtacttgtagtcctcaatggagaggcgtatgtagagggcaatcacatatttctgcattgttccagcacctccgcataggtttcaaactcgctctggaagcgatagcgcaccgtgatctgcttattgtgggatacctcaatgcggtcgatcagccgctcaatgagcgcaccggtcagcgcacggtcggtcttgatctgtgcagcatcctgtttcagcgcccggtgctgcttggtttgggcatccattgtccgcagaccgtcctccaactgttccatttccacggcaagatcggcaatgcggctttcgtacttttccttgtagtcgaaatattcatccttggtgagaacgccttgaacaaggttttcatacaggctccgcacgataccgcgaagccgctggatttcctgtttgcggctggtgatcttctcccgcagctcagcgcggtcagcggcctgccggggcagttctgcaagggagagggtgtattgccccagcgccgtatcaagcgcgtcctgaagcatatctgccaacatatccagcaacgcatcctcgcggatggtcacgccggggcaggcatccttgctgattcggctcctgctcagacaatggtagaagtacacatcgtcggacttcttacggatgtttctctgccggtgcaggctgccgccgcaatgggtgcagaacaccttgcctttgagcaaattcggtgtgtatgcgttgatctcccgcgccttggcgcggctggcggtctgattgagaatttcctgcaccgccgcgaactgttcccggctgatgatggcctcatgggtgtcccgcaccaccgtccattcctcggcatcagccttgacctgccggtgatccacggttttggtctgcccctgaacgagatctccggtgtagacctcggagcggagaatgacgccgaccgttcgggtctgccacttgccgctgccgagcaaattttcgtgggtgatctttccctgcatcttcttgtagtggctgggggtgaggatgccagcctcgttcagccgcacggcgatggtattcaggccagcgcccttggaagcccaacgaaacatccgctgcaccacgacggcggcaacggggtcgatgataagctggtggcaatcgtcctcggctttcagatagccgtagggagtacgcgcaccgataaatttgccgtccttcatggcctgccgctgctgcgccctgatcttgcgcccaatgtccaaagcgtaggcttcgtttatcatgttccgcagcgggatgatgataccggaatgggcatcctccggggcggcggtatcgaagttttcattgaccgcaataaagcggatgctgcggatgcggaaatactgctcgatgtaatagccggtgtcgatggtgttccgccccaaacgggagaggtctttcacaatgacgcagttgacgtgaccggcctcaatatccgagagcatctgctgaaagcccggacggtggaagtttgtcccggtcgcgccgttgtcaatgtaggtatcgtacacgctgatctccgggtactgctccagatagcgggcaataatcatctgctgggtttcaatggatacgctgtgcgtgtgggtatcctccaccgaaaggcggacatagatcgcggcgcggcaagcggcgtcagcctcctgcacggccaccgcagccgtttcttttctgcttttccttgccatgctcagcccacctttctctgttcgtaatctttctgctgcgctgccagcgccagaagctgcaacgcctttttgtattcgtcctcatgggtaaaggtaatatccagctccttcttcccacggacgcggatgctctgtaccatgtgaatgagcgccctgcggtctaaggtttccagcgtggagaactgcgtaaactgtgaaatccagcggttgcgctcactccggttttccagcacctccgtgagtttttccttgagaacgcggacgctctcgcggatgtcctcagcctgcttggtgtactttgccttataggaagcgtattcttccttggtaagcataccccccacaagactctcataaagccgtgccttgaactccagcacctgctccaaccggcgctcgttgtcggtgatgtggtcgctgtattccttggcaagcgcctgattgatgctggtctggtcaatgccggtcagcagcgcctccagagaagcaatattgccgatataggctttcaggctgtcccgcacacagtcgatcaggctgctttctttcagcatgaccggatgggcgcagccctttttcttgccggtaggacaataatagtagtggtactccttgccgtttgcacggttggtcttgcgggtcatgcggcttccgcagcacccgcagatcagaataccggagaacaggtacaccgtatcctcgttgggagaagtgcgggtatccagtcccttaatgcgctgcaccagctcaaaatcctgacgggcaatcagcgctttatgggcatccgggacgcgcacccactcggaggcggggcgctgctccatctgcttgatcttgtaatgcggcgtaccctgtttgccctgcaccagcgttccggtgtaggtttcgtcctgcaagatgcggatgatggtggttgccgaccacttgcagtcagccttgtccgcatagccctttttcgcgtagggcagaccgttgttcttcttgtacgccagcggggagagaatacccagccggttcagctctgccgcgatcttggaggcgcttgcgccctccagccgcatacggaagatgtcgcagacaacgcgggcggcgtaggggtcagggacgagcaaattcttgttgtcctcggctttcatgtagccgtacaccgggaacgcgccgacgaaatcgccgttgcgccgcttcacgtccagagaagaacgggtcttgatggaactgtcccggcagtaggcttcgttcataatgttcttgaccgatacggccagatcatcgccgctgtcgtgggcggtgtcgatgctgtcggtgatggcgatgaagcgcaccccataggccgggaatacccggcgcagataccggccggtttcaatgtactcgcgccccagccgggagaggtcttttacaatgacgcagttgatatttccatcggtgacatcctgcatcatttccttgaatgcgggacggtcgaagatgatgccgctgtatccatcgtcgatcttttcggaaacgacctcaatatccgggttgtgctccacaaagttttcaatgagcttgcgctgattggaaacgctgtcactctcgctggaatgatcgtcggtgtaggacaggcggatataagcggtggctttgaatttaggcatgaaaaagcactcctttctcccggactgctcccgcatgaaaatagtggttatctggctattaggttttcatccttttccacaccgatcatagcactctctgcggaaaaaagcgaggatgtcgctcagcgcaaaatgccttgcagacattcctccaacgtaacaccgttcccggcgaagcaggcgtttaccacgaaatcgccgcagcggaagcggtaaggatttttgatctggcgaataaaggcggcaatgcgttcttccttgggaagatttttgtctacggatacttcccggatgtccaccagttcatccgtgtggatttgggtttcgtttggtgtcggctgcatcatggcgatctcctttctcggtttggtgggtttcctcaaggtcacatgaatgcgctgacgggaaaggccatcagcgcatggtatctgactttgagaggcggctgcgcgggcagaattggagccacataacataatggcgaataccggcgcagccgctctgcttgtccatttgagaagatccatcctatttgccacgcgccccggatagtgggcatgatgcaggccgcccttggcagggctgtcataactccacgataccgctgcctcaaagagctggcgcataccgcagggttccccctcaagtctgtgggagggcgtgagcaagtttcattatccgccgcgctgtcatcgcgcccgatttgccgaatcgggtctaaggctgcgtagatcgctcggatggcttttccggaatcacctccttgaagccatcgtcgtggcggcgcaccttatgccgctatcacgcgggttttgtgcctgcatcatggtctattcagttttcaacgttcggtgaaaggcttcgtggagaatgtcccttcacctatcgccgattttgggccacttttgcaccctgttttcagcaatcagggaaaagttttttcattttcttcatcgccgcgccgatgctcttggaaatattctgatggctgacaccctcggctgcgccaatctcatcaaccgtcatcccatccacgaaatacatccacaccctgcggaactgcgtatccgtcaggtgcttccgaatctgcgtgacctttctgacgctgcggtggattgcctctgcccggtcatgcgcctgctccatgcagacatccacggcaggaatggaggccgcttcctcggatagctcatccaacgcaagcgtgtgattggcatagacgtgagcttccttttcggaggcgtgatagtcctcgtccgacagggctttccatttcagaaattctttctcgctggcaaagtcctcgcgggtcaggcggacgatgacttcattggcgtccatataaacgatggcatcggggtctttcttattcagcgcatagatgctttttctattaaacattttgttcctccgttcagatccgagtgggtaaaaaggtctgaacgaagggcggcggggagcggcagcccacggcgaaaaagtgccgggaacgacaaaaagcgcccacacaggcataaaagcctgcatgggcgcttcggtgcggttcagtatggaaattgtcggcggctgtcggagggcataggtatcctacggtgtccgggtatcgtccggctatgctcccggcgcggcttgttgccgcagcattagcggcacctcctgtgctctcctgtcatacgcataggtccctttcatctgaaaaatgttgggacagcaaaaacaacggccgccccgtacagagcagccgccgttttccctataccatacgctgcttttcagtaccgcaaggatgggtgtcctgttatcgtcgtattctgatttcttttagggcatttcaggactatccacaagggatacgctgaactcctgcgcggttgccccctccggcagcagctttgccatgaccaccagccgctgattgccgctgttggccttgtcatacttccggcagcaggtggagagggtcagaacggtatcttcctcggagaaggtcacgccatcaaagtcaagccagtttttccgcgcaatcgtctcaaagaagctggtcagatcatctcccgtgggatcaggcgcaatatagtcaaagccaatatccgtgacgaatagcgcggtgatctggaaaatcatgtcctcgccatccacagagagatagatatacggatgctcctttacaaagtctgcgtccatataacggtagagcttggtgaaccgcacaccgtccgggtcgcagttgctggcggagtgaccgaaaacagtggtgtttttgtccagcttatccctgccgccgatttcgttttcacaatgggcataatagcagccccacatggcatactcaccgttttcatccagcttcaggtaatagccgttgtcctccgcctgcatcacgggatcgtctacctccgcaccggggatatacagccatgccacggtgtcgggattcttcgctctggcttccgccaactctgcctgcctgtccaccgaggggataacttcgcccgcgggagtcgctgatggctgagacgcagatgtgccggaaggcgttctgtcgggaatgtcgataggctccgtccctttctgatagcagcccatgactgccgtggtcatggcaaagagaaggacggccatgcagatgatcggacgaatgattcttgtgattcttttcataatgctgtctccttgccgcgctgggatagcggcgcagctcaaaatgtcattgatttgtttcttgtagcgaaaagagaacagcgcagcttcagggcgagatgcccgtccgctgcgctgtccgatgttcgcttatggggtcatgccagcggctttgatgtttagccgtatgtcagccggtcacttcttgcagcgccagaggaaggtcacgatctgcgctctggtgcaatccgcattggggctgaatgtcgtgctggtggttcccttggtgatgttctccttgaccgcccacaataccgcatcagcatagtaggcggtggacttcacatcagcaaagggattggctgtacccgctgtcggggacttctcagaacgccacaggaatgtgacgatctgggcacgggagcaggtcatgttggggctgaacgtggtgtcgctggtgcccttggtgatgccgttttctactgcccacagcacagcgtcgtagtagtagctgcccacaggaacgtcggtgaagggcatggtgctggttttagaggcggggcttccagcggtgcgccacaggaaggtcacggcctgcgcacgggtgcagatgccgtccggggagaaatgggtatcatcggttcccttggtaatgccgttctccactgcccaatccacagcatcctcataatagctgccggtggctacatccacaaacacgccggtctgggggttgccgttggctttcataaagatgacctcgatggtatgggttctgctgacattctcaaaggtgtaggacttcaccgcgccgatgctcttgccgtcgatcttgacgttggcgacagcatagcccttatccggggtgatggtgaaggtctgatcccggccctcacggacgctgacattgccggagggagaaatggagccgccagccccggcagttgccttgatggtgtaatagctgtaagaatggccgctgccattataacgccagtgtgccgtataggttcggttgccagtgctgcccgttgggatggtgacggtcatattgttctcgccgtcaagccccgtgccgctccagccggtgaaggtatagccggatttggtaggattcttgagggtgaaagtcctcgtctcgatggtgtaggtgtcgggattgccctccgcagtgccgccggccagatcataggtgatcgtgtactcggtgggtgcaggcgcgtccttttcgaagatggccttgacctccacgttgtcgttcggcatgaggaacttgttgttcttgatggtcacgccgccgctgatgacttgccactccttgaagtggtagccctctttgggcatggcggtcagggtgatctccgtgccggtcgcagcggtggaaggagttgcggtgccggtgccgtttccgtcattgctgacggtgacggtgtaggtggtggggtaataacgctgttttcccacagcgccttgatctctgtgtccccgctcacggtataggtatcgcctaccttgtactccgtgccgctaatctcccaagccttgaactcctgatcggtgggagcggtgaagccgcagacgggcaggatgtaatttgtctctgccttgacgatcacgggacccatgctgccgctgccgccgttgccgctgaaggtgattgtgcaatccgcaagcggcgtaccctcacccacagtgacttccgcatcggtgctggcaaagtggttgttatcctccgcatagcggacgaagtaattgccagcggacaagttatcaatctccgtgccgctgcacgccgtatagcttctttcgcctgccatacggtattccatcttatcagtcacgccgctgattttgccgtcgctgccgcccacggtgatgggcgcgacaccgatcaagccgtcaggagcttcccgcgtggctttgccgatgctccacgctgcggtcacggcatcggtgctgccgtccacccatttgccggtcttggatgtgacgctaacggtgtaatcgcccgcgtccgtgccggtgttgccggagatgtccatagtagcgagatcatagccgttcacggtcgcggtatgcacagagccgttataggtatatgttcccgttacgctgatgttgggctttgcgggatcggtgggcacgggaggtgcgtcctcctcgaagatagccttgacctccacgttgtcgttcggcatgaggaacttgtcgtccttgatggtcacgccgccgctgatgacttgccactccttgaagcggtagccctcgttgggcgtggcggtcagggtgatttccgtgccggccacggcttttgcatgagatgcggaagccgttccgttcccgtccgttctcacggtgatggtaaattcggtgggcgcgggaggtgcatctttctcgaagatggctttaacctccacgttggcactcggcatagtgaacttatcgtccttgatggtcacgccgccgctcatgacctcccactccttgaagtggtagccctcgttgggcgtagcggtcagggtgatctccgtgccggccgcggcttttgcataagatgcggaagccgttccgtttccatccgttctcacggtgacggtgtgctcggctgcgggggcctctgtgctgatggtgaagtagtgctccgccttgccgcagtagtttcccgtgccgtacagcgtcaccttgggagcctttttgctgtcaaagccctcgtcgcccggtgtgagggtgtagggatggacgttgttggaatagatggcggtgtagtccgtgttctccgtaagctgcttcgttttgttctcgcccgtctgatgggaaagccccgtcagcttcttttcgctgccgtcatgggcgcagtccgtcagcccctcgagcgtcaaaagcccatgctcatagcagtatccaagatcatacttgtcgcagagcgcgcatttgccgtactcgtcagggctatggtcaatggtctttccgttgacggtgctgccgcagatggtgatgttttccgccggaataccgggcagctcctttgtgtgcagcttgtcatagacatagtttgtgccgtccttttcctcaagccggaaggattccaccgtgctgttcagaatttgaatctttccaatctctgaagctctgccagacgagtttttcccgatgccgggaatatagtcggtaccagacctcaaattgccgccctttgcggtcacggtgctgttttcaataagaatatttatctggcctccacttgagccatacgccgcgccgatggcggggccgaacaattcattgcgaacggacacctggctgttcgcaatgcggatacggctctcaccataggattgggattgtgtaccgttgccgataaccgcgttgactgaagacctactatcgatttggctgtcctgaatgtcgatgctgccaaaggaagccttttcgccgccgccaatcgtgcagcgattataggtgtactcatcgttcaggcggatgctgctgccgcggatcacgatctcttcaacggaagaatattctccacgtgcgccgatgatatcgcccgtcaacacgatgctgtccgtgatctccagctttttcagcgtctttgcatcattcggtgattgcacggtttcgtccatgaaaataccgtaggtgtgcagatcggaatcccggatggcgatgctcccattgccgccgacgcgaatgcctctcaaatgcggcagcctgatctcgccgttttcaataacgatctcgctattgctgcccacgcggatcccgtcggtatgagtggtgggtatgtccgtggattcaacgcggcagtttcggatggtgagcttcccacccggcgagtctgcgtcccagccgatcaggaccttttcgctgctgagaagcggaagctctgcgtccgaaatggtgatgcttccgacgcttccgccggcagctccgccgatgcaggcgccgtccttactggaaatggatttgatcgcattgccgttgatggtgatgcttttgcaatccacacgctcggaatagctgtccgtaaagccgccgatggctgcgccgctgccctcggcggaaacggtgagctcaccgccagtgatgcgaatgtcgcccttactgccgatgcctgccgcaccgccttttccgaccgcatggatgacgccgccgttgatggtaacgccgctcttgccgttgcctttatcgccaatggcggcgttattgtgattggccgtggcttctatctctccgccattgatggtaacggtcattgccccggtgttataaattctggctccgccgatgccgaagccctctcccttggcagttgccttgaccgtgccgccgttgatgatgacgctgccgctctcatacggcccgattccgtttccggagagcaccctgtgcgaattttctccaaagttgttgacgcccccaatggcggttacatcgccgccgttgatggtgatcgtgccgccatatcctgtggtgatcgcatcgcaggtagcctcggcgatgaccgttccgccgttgatggtgacgctgccgccatatcccatttggcatgtgccgatccctacgctgtccacagcaagaggattgccttccggcaaggcaaagggttcggtacggacaacgccgccattgatggtgatgctgccgccttgcctgagattgccaggcgtatctccgtcggaggaaacgttgcgatcataatccgatccgccgatggcggaggagccctgctgtcctttggcgtggatattgccgccgttgatgatgatcgtaccctcgttttcatagtagttgtcgttggcagcccacacgcgcacaccggcgccgatgccggacagtccagccacaggccacacactcttttcatgatcagacagctccgggaggcacgccgtcagcttgcccatggatgcctcagcggtgctctgggcgtatatggtgaaggtgtcgccctccttcacgttgatgccccacggtaccgtgaggtggcagtcgtccttcaaaatcagattgaccgcgccgtgggtgtccaagcggggcgtgatggtcacgtcgccctccaccacgtaccagcctgcgggcatatcgtaccacttgttgtcgctattgaaaaaatcctcgataataactctttccagcaccgtgtattcggtgcagaagcgctccttgccgtccgcgtccagatagcgcacgggggtttgctcgacagcgttgttcacggtaatgctcagcgcccttgtgtcgctgccctcgctgttttctgccttgacggtgaaggtggcggttcccgccgcagtgagtatgccgctgatttctccggttttttcgttcagacgtaaaccggcaggcagagcgccttcatcaatgctccatgtgatgggcgctgcgccgatggcggtcagggtatggctgtaagccttgcctgtcttgccgtccggcagactgtccgtggtcacgatgacggtataggtgtctggcacaaaccgcgccgtgagcgtggttacatcctccggaacgctatcaccgggcgcgtagagcttgccgtcgctgccaagccacttaaagtaattgcctgtagctccctccgggcgggtcagaccgtcggacgcaggcgcggtaaattcgctgccgtttttcacgatgatccgaatgctgctttcatcgcccagcttgccgccgccaaggtcaagagtaacggttttcagcccgtcaggacctatcgtgtcacggttcaaaacctcgaggacggggcggaaaccgacctgcgggttttggcccgcagcgtcgcggtggccacagaagcggctcgaatagtgcccgcgaaccgtacggcgccacggcaatctgatcacagtatcttgtccacacgaaaaaatcccgttccagtttttgatatatccgtcgtccttgtccagcagcctgtcccattcgttgctttggggcgtgccgcgttctgaatcacctgagcctgtataatcacttccctcggatggcgcacgcatcgtatagtccacaccgccggcggtgtagtctttgccaaaaatcaaccctgcggtgttcaggtcattccagcttatcgtatgcgttacggtatagtccgccacaaacaggctgtgggcatatttgttctgctctgcatactcctcggtggttgccatctccgatgtgagcttgtaggcgtccactgtcccggcgtaggtaaaggggacataatgcattgttttgtccggcagagagccgttcgccgtgccgggaatgctcacgccggagaggtcaaagtaataggtgccgtcgggagcgaggttgaactgctctgggggaacaaactgcgccgtcagcttggttacgtccgccggaacattatcgtccggagcgtagagctcgccatcgctgccaagccactcgaagtagctgccggtatttccgtcggggcgggtcagaccttcggacgcaggcgcggtaaagctctcgccggttttcacaatgatctggatagtatccgagcttcctcccaattttccgccgccaaggtcaagggtaacggctttcagcccgtcagagcccagcgtgccggggttcaggacttcaaggacggggcggaaaccgaggaacgggaaggagagcgtagtattggcgccggcatatttgcggggcaaatcgtaccggccgcgaatcacacggttcgatagcgtattgggtaaagtatcttgtccccaggaacctatatttctccagtttttgatatatccgtcgtccttgtccagtatcctgtcccattcgttgctttggggcgtgccgcgttctgaatcacccgagcctgtaccaccacttcccccggacggcgcacgcagcgtatagtccacgctgccggtggcgtagcctttgccaaaaatcagcccttcggcattcaggttatcccagcttaccgcatgcgttacggcatagtccgccacgaacaggctatgggcatattttttctgctctgcatactcctcggtggtggccatctctgatgtgagcttgtaggcgtccactgtcccggcataggtaaaggggacataatgcattgttttgtccggcagagagccgtttgccgtgccgggaatgctcacgccggagaggtcaaagtaatagacgccgccgggagtgagggtaaactgctcatcaaactgtgccgtcagcttgattacatccgccggaacgctatcgccgggcgcgtacagtttcccatcgctgccaagccactgaaaataactgtcggtatttccctccgggcgggtcagaccgtcggacgcaggcgcggtaaattcgctgccctttttcacaatgatttgaatatcctcagagctgccgcccagcttgccgccgccaaggtcaagggtaacggccttcagtccgtcagagcccagtgtgccggggttcaggatttcaaggacggggcggaaaccgacgtacggactggagcgcgtagcacggttgtagccccagaagcgggccgaactgtacccgcgaaccgcacggctcgtccacgaagagcgcgaaatatcctgcccccacgaatgcatcctgctccagtttttgatatatccgtcgttcttatccagtattctgtcccattcgttgctttggggcgtgccgtgttgggaatcgcccgagcctgcactatcgcttcccacggacggcgcacgcagcgtatagctcacaccgccggcggtgtagttcttgccgaaaatcagccctttggcattcaggttatcccagcttacctcatgcgttacggcaaaatccgcaatgaataggctgtgggcatatttgctctgctgtgcatactcctctgtggttgccatctccgacgtgagcttgtaggagtccactgtcccagcataggtaaaggggacatagcgcattgttttgtccggcagagcatcgttcaccgtgccggggatgcccattgccgagaggtcaaagtaataggtgccgccgggggcaaggatgaactgctcgtcgatttcacccgccgcgaaggccgttgtcggcagcagcgtcagcaccatgcagcacagcagcaggatgctgaggattcgtttcttcatgtcctttttccctcctgttcgtgtcggttcggcttatccgccccgtcttttttctgattttctctttttctgagccggaagcacagcgcggtgatcgccgccgccgcggcaaaggagacgacagccaccagcacatagccgcccgcatcctcccgcagcagcatcgcgccgaacacgccccatacggctgtctgtcccggcccgacgaccgtgcccgctgtctgcatcagcgccgcacacagcagcatacacgcggcgctcagtccatagatgccgcgccgttgcctccggcggttgttttcccgcacccgctgcttgacgagtgcgacccgtcttgcggtatcgtacatttcgtttgaacctcctctctggattttttgaaatgcggcttaaaaaccccttcacttatataggtacaaaaaatcgaaaaaactctcacccaaaacgcaaaatttttcaaaaaaatttgagagccgccaaaaagcagctctcagggagtggctattcggttatttcctctgcccgaggcggaaagcggacagctctcccgccgccaccagcagcgccggcagggcgtaggccacatactgcgccgcgccgccgtaggcgatgagcagattatagatggcgtggagggtgatggccgcgcccaagaggccgcaggtgcctgcgatcttcagccacgtccgctgccacgtgtatgcaaggccaccgccgacgatcaagccgcagatcacatgcatggcccccgtgccgaagccccggaagaaaatgaaggagaagcggtctgcgccgttctggatcagatagcagacgttttcaaaggtggcgaagctcagggcaaccgtgatggcggcgggcttgatcttatcgccctccggctcgaataccagaagatagaacaccagcggcagcagcttcatcatttcctccaccaccggcgcgatctccgccgtggcggcaagggcgtccgcctgacacaccgccgcgaggaaggtgttgatataggccgaaagcagacacacccccattccggcaatgcagaacaggaagaagcggagctgccgcctgcccatgcacagggcggctaccagcagcggggataccatgcagaggaagatgttttcgatgtaggtcatgcgtccaccgcctttctcgtggcgggcagcagccccagaatcgcaagcgtcagtagcatatcacaccagaaggtgggacttgccggtgaggtatccggccagaagcagcccgccgtccacagcagatattccgaaccggcaaagcacagcacgccgatgtggaagcaccgcatattccgcgccgcgcccgtctgtccgttggcgtagaccagcccccgaatggcgcagaaggagagccatatcatcatgccgcaccagatcaggttggagagaatgtccccaaaggtgcagtagaacgccagcagcggcacgccgaacgcaggcgcgagccatgccctgcggcagcggaagctgcgctcgtcctgactggcgagcgtggcctgcaaaatgcgcaggaaaatgacgctggccacccagccgaactccgagacatagaaaacccgcggcgtggtatcgaacagcagcagatacagcgtccagtagagcgcgccgagggcaaagcagccgtagaagcacagcagcagaaaatacgcctgtcgcccacttttccggtaggagatacccgagagcagcgcgcccacgaacgtgaccagcagttgcagcaggttctcaatcagctccatgcgcatcctcgctttcctcgttctgcccgtcctcccggttcatctgccgcagccggaagcacagaacggtcacgcacacgccgagtaaaaacgccagcagcccgatgacgatgtatcccaaggcagcgccgccgccgtacatactggccgccgtttcaaagccggagtagtcgcctgtctggatgcttgcggcaatgccgggcatggcaagggacgcgccgatgagcagtacaaggcacgccgccacggcagaagccatggtgatcgtattgcgccgcagccgtttttcccgctcaatttgggcgatgcgccgcttcgtctccgcgacgcgctcctcatgactccgcatttgtgattccctcccgttccagcagccttcgcaggctttcttttccgcgatacaccatgttggtgatctgttttaccgttttccccgtgacctccgccgcctgtgcgtagctcatatcctcgaaataggtgaggtacaaaacctcccggtagtccgggttcatttcatccatgcagaagtgcaggatgcggtttcgctcctccgtccgtatgacctcctccgccagcagccgtccgtccggctcaccggtcagcgcatcgaggctgaatagcggttttcgcttgctcttgtggcgcagtgccatgtgccgcgccgccttatagagatacgccttgaagccgccgtcccgtacttttggctttttcgtgaacagataggcgaaaacatccagcatcagctcctccgcctcgtgaacgtcgtgcagatagccgtcgatatacagggtcagggggtcgccgtattttttcatcagggcattaagcccttcgtcatcaccgctcagatattggcggtacaagctctcgtcgcaagtcatagcgttcacttcctttttgcggatgcttccaattccaatgcggaggggattcgtcaggtgcttgtcctgccggaatcgcggtgctgccccttgaagcgcgggtcggagggcttttccgcgttttccgggatcgcccatgagcgcccgaaccgggacgcgccggggatccgcccctcggcgcaatattggttgacccgccgctccgacacgccccaacggtaagacgcctcccgaatggagatatagcccttgatcccgttcataccgcacctccgcatggataatactcaacacgatacattatatacgaatatccgaagaaacacaagacatccggcgaagtgttcagagaaaagttacggataggagcgacattttttgaaaaagtcctccgaaactggccaaaacgcccctttcggattgtagtatgggtagaggggaaaacgggggtacgaacgggggcaagaaagcggcaagcaatgcaaagcggtacccactttgcaaaaacaggcggattccgtttacacggagcccgcctgtttcatgcttgttggggcgctgccccaatccccgcagaacacaaaaactgtgttctggaacgatggataaatccatcggctgcgcgattttgcaaatcgcttatgggcaggcagctcagcgctgctctgcctctttttcccgtcgttcattcgcttcctcctgctccttatccagctccagaatacggtcgatattggccttggccgtcagcagctctttcatttcctcacgggcttttcggtagtcggcataggcggctttcttctccgccagcagctcggcgtactcggtattcagcgccttgatggtgggcagcttcttgaagcccagtccatcaaaatagttctttgcggccttgtggatcgtgatctcgctttcatgctctgcaagaaatttcttggagtacccggccttgcgataggcaacgtaggtatcgcgggtcttggcgtaattggcaatatgctcccgcagcaccgcaatctcagccatgcgcttttccgcagccttaatccttgcggaaagctcattgaagtgagcggacgctgccgccgctttctctgagagaacggcgtaatctaaaagctcatggtcttgcagataggccaccgtctgtgccatctgcttcaaattgaacaacgtcgcccaacgcgcataaccggcacctttgccagcgcgtaattttgtctgaatgtccaccagcagattcccgctgcgcttttccggtttgaccggtgcggcggcgctctttcgcggcgtatgcgccttttcacctgcaatcaccgcacgaagatctgcgggagtataaccgtcgccgagggtatccatgcgaatggattttttctgttcgccgcctaacagggacgggactttcttgcccttgacctcatacccggcctgccgcagcagctccagcagcgtttcaaagctgtcgggcttttgcgccagcgcatcgtcaatggccgcgcatatccgctcccggtgggagggcttctttttgtcgcccagccacttgttgtagctcttgccgtggcgcttcggattctccacgatggagtagccgttctcgatgcagatggtatcgttgagccgccgcacggcgcggctgctgccccaaaagtttctgaatttccgggtctggctgagtgcggtggagttccagatcacatgattgtgaatatgggctttgtcgatatgggtgcagacgatataggcgtgattgcctttggtgaatcgcttggccagctcacagcccaaacggttcgcttcctccggtgtgatctctccgggaacgaaggactgccgcagatggtaggcgatcacatcatcctcgccgcgcactctgccggtcttgtgggtgtattgatttttggcgaaaaggaactcggcatcggcgatcctgctgtcgcactgccagcttgttatcagcctgccgccgtccgtcttttgcggattttcggtgtagtcgatgatagcgctgatggcctgtcccaccgtgcggcctttgccggtgtggagaggcatcaggcgtgtggttgccatgttggacacctccttgaaaagtcaaacggcctgccgtagcagaccgtttgaaatgtgttaatttgcaagaggtaaaagcaaactgatagttcgacaaatgggaatttgaatactacgattttatgagcgattatcgctcaccgtgggttttcaataaaatcctccaaaagccttgaaaacaaagggtttttcgcagcgtgttcgccttatccctttattcggtttcacacaagtttacccttgccctggccactcataagggcaaaagcaagggcaagaaaatctcgcaacaggatatggcaacgtgtggcaatcggggaactgtgacgtatgtgcgaatatattatagcggaggattttattatggacaagtacatttttgacaagaacaacggcctttggtatgaactgattggcgactactatcttccctgtctgaccgtacccgctgaagaaggacagcctgttggcgtatggggtcagcggcacaagcggtatctcaaagaataccgcccagccttttataatgctttgctgttaagcggcaaactgaatggctaccttgccgatattgaccggcaggcacaggagcaaatggtcaccgtcattcggcaaatgtcgaaggcccaaggaattactgaagtgttgaaagctaccaaccaagcggagtgggtaggaatgatgaataatatctgttttgcggcagtagaaatgattcatgatgaaatcatatacgcataagtacgaaagcggctggggatataccctgccgctttcatgctcgtcaaaacagttatctgccagtgaagatgcagccctctatatcagtaattgaaaataagacaaggcagactaaaaggagagggaacaatactttgcaactttcaaccccattttgttgcatttcacgccaggcaaaaggatgttttgcaaagaaaatcaagcaatgcgaaattaaaatataccctcttgacaaacgaactataattctatatactcagttctgtcaattgaataaaatcttcagggcagggtgtaagtccctaccggcggtacagcccgcgagccgaaaggcatgattcggtgaaactccgaagccgacagtatagtctggatgaaagaagatttgcagtacacagggatgaagtttatcaccctgtgcgtgtaagttgctctggattgttttcaatccagagttttattttatgccggcgctatgtctgtgtctatctgcgtcgccctgaacgatttgttcagggcgatttttgcttttgaggtgatggtatgagtgacgaggattatatgtctttggctttgcattttgcaaagaagggagttggctggacggccccgaatccaatggtgggcgcagttatcgtgaaagagggccgggtgatcgggcggggctggcatgaaaaatgtggacagccacacgccgagaggaacgcccttgcctcttgtaccgagccctcggagggagcgactatgtatgtcacactggaaccctgctgccactacgggcatcagccaccatgcacggaggccatcttaaacgtcggcatcaagcgggtggtggtaggttccggcgatccaaatccccttgtcagcgggagaggtattcaaatactccgagaacacggaatagaggtgacggaacatatcctggaggacgaatgtacccggctgaatgaggtgttcttccactacatccagacaaagcgcccctttgtggtgatgaaatacgccatgacgctggacggaaaaatcgcaacctatacaggggcctccaaatgggtcacgggagagcaggcaagaaatcatgtgcaggagcagcgccaccgctacaccggcatcatggtgggagttggaacggtactggccgacgatcccttgttgacctgccggaaagccgggtgcaaaaaccccattcgcattatctgtgataccgatttacgcactcctctaaccgcccaagtagtcactacggcaaaacaggctcctactatcctcgttacctgctgcgctgaccgtgaaaaatggacgggctacgaagaagccggctgccgtattctgccggcggaacggaagaatggccgcattgatttggagcggttgatggaacggctggggcaggagggccttgacagcattttgttggagggcggcggcacgctgaactgggccgcgctggaaagcggcatcgttcagaaagtgcaggcatatatcgcgcccaagctgttcggagggcagacggcaaaaacgccggtagagggcgctggtgtaccgttgcccgactgtgcgttccagttgaaaaacatggttatcacgcagttgggggaggacattctgctggaaagtgaggtggcaagtcatgttcaccgggattgttgaagaaattggaacggtgacacaaatccggcacggcccgcactccgcaatcctcaccatagcggctgaaaccgttttggaaactacgaaaatcggagacagcatcgccgtcaacggtatctgtctcaccgttaccgctttatcggacacctctttttcggcggatgtcatgcacgaaacgctgaaccgctctgctctgtcccggctgggtacgggaagtcatgtgaatttggagcgggccatgcccgcggacgggcgttttggcggacatatcgtggccggtcatgtggatggcgttggaacggtggcaaatgtgcggcgggacgatacggcagtctggttcaccgtgcgggcggcgccggatattctgcgctatatcgtggagaaaggctctgtggcgatagacgggattagcttgaccgtggcggcagtcacacagacggatttttccatttccgccattccccacaccgtggcgaatacggttttgcgggaacggaaaaggggcgacccggtcaacctggaaacagatgtgattgggaagtatgtagaaaagctgctgttccccaccatgggcaggcggcaggataccacaatcaccaaagaatttttatctcaacacggattttaggagggcaggcaatgatacagttcagcactattgacgaagctctttgcgaccttcgagcgggcaaaatcattctggttacggatgaccccacacgggaaaatgagggggacttcatctgtgcggcggaatttgccacaacggaaaacatcaatttcatggcgacctatggcaaagggctgatttgtatgcccatgtcgcaggcttatgtggaaaagctgaaaatcccgcagatggtacagcaaaatacggataatcacgaaacggcttttaccgtgtccattgaccatgtgaccacctctaccggcatttccgccgctgaacgctctgtgacggccctggcctgcgtgtcagaggacagcaggccggaggattttcgacgacctgggcatatgttccccttgctggcaaagcgaaacggcgtgctggagcgtgacggacataccgaagcaacggtagacctgtgccgtttggccggtctgaaagaatgtggcctttgctgcgagatcatgcgcgaggacgggacaatgatgcgtaccccggagctttcggaactggcaaaacgatggggaatcaagtttatcaccatccgggatttgcaggcttaccgcaaatgccacgaaaggctggttgaccaggtagcggaggtcaacttgcccacaaaatacggggaatttaccgcttatggttttgtaaacagattaaacggtgagcatcatgtggcactggtaaagggtcagattggtgacggcgaaaatgtgttgtgccgtgtccattcagaatgtctgaccggggacacgtttggttccctccgctgtgactgcggtgaacagcttgccgccgctcttacccagattgagaaagaggggcgaggaattttactctatatgcggcaggaggggcggggcattggcctgatgaacaaactgcgggcgtatgagcttcaggagcgcggattggatacattggaggccaatctgaaactgggctttgccggggacgagcgggagtattatattggcgcacagattttgagggagttaggcgtaaagagtatgcggctgctgacgaataacccggataagctctatcagctttcggagtttggtttgaaaattacacagcgtgttcccattcagatgaagcctaccccctacgacctgttctatctgaaaacaaaacagacgcgcatgggacacatcttaacctatgaaagagaggaagatcgccgtgaaaacatttgagggaaaactggtagcaaaagaggtcaaggttggcatcgtggccgcacggttcaatgagtttattacatctaagctgttagatggagcattagacggcctaaagcggcatgatgtgtgtgaggaagatattcatgtcgcgtgggttcccggcgcgtttgaaattccgctgattgcatccaagatggcaaaaagcggaaagtatgacgctgtgatctgcctgggggcagtaatccgaggctctaccagccattacgattatgtttgcaatgaagtgtccaaggggattgccgccgtttccctggaaagcggtgtcccggtgatgtttggcgttctcactacggagaacattgaacaggcgattgagcgggccgggacaaaggctgggaataagggctatgattgcgctgttggtgcgattgagatggtaaacctgattcgccaactctaagtaaaagggccttgcagttttatgatgccaaccgtttatgtacgcaccgcatggccttctggctgtgcggtgctttttgccgtcagtcctttgtgtaggcgtccacgatacgtacttccaactcccggttccgctccatcgccctgcggagttccggcacttccagcaggcccttggcgttggcaatgatgaggatacgattgaggctggcccccaccctgcggacttcgtagatcagcttcggcacgtcaacggagggggcctcccggatggcagcgccgctgatacactgccggataaaccgctcacgggaaccccgtaccctgctgaccttttcgttgaggtcggccagttcctcatcagacagacggatgatgatttggttggttctgcttcgcatagattctccttcctccggggtcataggggtggaacccctgtcaagcggtattgtgatatcacaatacgttgcttgctaagactgtaccacttcccccatggcgtattttgcgggtgcgtccccgccgccccggttgctcttttcagccggtaaaaaaccgtcactcgaccctgcggacatcgccctcccggagcagattccgcccctgattgacggccatgaaccgttccagcgtgtcccgacggatgatggctttccggcctactttcagcaccggcagcttgccccagtccaccagcttccgcatggtgttccgcccaatgcccgtacactcggcggcttcctcaatggtcagccccattttaactgcgctcattctgcacgcccctttctattgcgcttgttttgcaaccgcaacaccgatattatacttaaagcgccgtcatctgtcaactcgttttaaggcgtattaaaaaatatttttgaaaatatacgtaaaattgggttgcaaatcaaacccagttgtgctatactcatactcgataggaggtgaacttcttggacaacgcagaaatgctcactccaaaagaagtgggaaaacgtatcaaagagcgccggaacgagatcggtatctctatgccggagcttggacggcgggtaggggtcaacaagtccaccatccagcggtatgaaacagatggggtcaatcccagccgcagcatgatcatcaacggcttggcggacgccctgcaaaccacctcggaatggctcgtagggctgtccgaggaaaaggaaatcacggcggcggacgatgatagccgcaccatctgcgagggcgaggtcttagaccacctcaacagcttccttgacgctgtgaccaaaacggtacagccagaagtccagcagcggtttctgacctctacgctgtgcctgctgatcgacctgttctccattactgcccagcactatggcaggacgctgaacgagatcgaccggctggccggggatgaagccctcaaaaaatccatccagcagtacaccatccacgttgacgacatcatcgtgccggtctattgccgggagatggaagctcctattgaggatatgaagcggttcctggacgggctgctacatatcttcgacaaagggcgtaccagggtagatacagtttatctgtataacatcctgcatgacgcccaagtgcggctgaacgccgccaacgattccgtggcaccttgacaacataatatgccgggaaaacccggcagaaatgatgcaacgcacatcatacgtcacaggcccgattgccacggatagaaaggagcatttcatcaatggcaaaaggttctgtacgcaaaaagggcaaaaagtggtactaccgcttctatgtggaggacgagagcgggcggcaggtacagcgggagttcgccgggacagagagcaaatccgagacggagaccctgctccgcaaggcgatggaggattacgaggcgaagaagttcgtggcgaagtctgaaaacgccaccgtggggcagttattggatatgtgggtagaagaagaactgaagcccggaaacctcagcaacggcaccgtgatggcctaccaagggacggtcaaccgcatcaagcagcaccctattggaaaccgcaggctgaaaagtgtcacccctgaccacctgcaagcttacatcgacctgctcagcttcggcgggacaaacccggacggcacagcggcaaaagcgctcagcaaagggtacttacggcagtattcggcagtcctgcaaggggcgttccgctttgcggtgttccccaagcggctcatcagcttcaaccccatgcaatatgtagtatggcgggggaagaaagaggaatacgagctgttctcccaggagaacggggatgccccggcggtgcccaccctcacccatgaacagttccgggcgttggaggactttctgaaaaagaaagacaatccggccctgttgcccattcagattgcctactacaccgggcttcggattggggaggtctgcgccctcacctggcaggacatcaacctggacgagcagtatctcacagtgcggcggagcatccgctacaacggggcgaggcacaagacggagatcggggccaccaagcggaagaaagtccgtaccgtggatttctgcgacacgctggcggcaatccttcggagggccaaaaaggagcagattgggaaccgcctgcgctatggggagctttacagcctgaactactgcaccgaggtcagggagaaagaccgggcctattacgaggtctacaccctgcccaggacggtggaagtgccggaggggtatagggagctgttctttgtctgtctacgccctgacggggccattgagacgccggggacggtaagcatcatgtgccgtcaggcgaagaagaaagtgccggggctggaggatttccatttccatatgctcaggcacaccttcacgagcaatctactgtccaacggggcggctcccaaggacgtgcaggagctgctgggtcacgccgatgtcagtaccacgatgaacatttatgcccacgccacgagggaagccaagcgtacctccgcacgtctgctggataaggtggtctgcggggagtaaaaagtttcccttgttccagcccgtgagggcaaaaacaagggaaagtacataaggcttgaacatttaatctgtgggaagccttgacatattagggtttcaaggggatttaacaaataaactggaattttcaaattagtctttgcaaataacctttgaaccttcaccatcaattacaattccctgacggttgttaattgggcatagattcaaatccgaaaactcagtcattattttctcggtaactttcttaaatggtgctgtaagataatgcggaagaacatagaaatcaatcaaatcaagccctgcatcatcttcttgtgagtagtcctccggcttttcatccatttgctcgatatattggatgcttggagcgcatataatcgcacctgccgattcaccaatcatcagttttccctttgccaattctttcttcaacagctcatccgttcccgttttacggagctggtctataaggaaaaaagaatttccgccggtaaaatatatcacatccgcatcttcaaaaacagactgtatcgttgaataagcctccgttgaaatatcaatttcagttacgattgctcccaactttttgaataattttcgagccgagccgacataaccggtgtagccttcacgcagcgaagctgttggaataaatgcgacttttttattttcaatttcttcctttatcagacttcctacacttgaaaagtgcgaacataaaaacagtttcatcaatattctcctttatatataaattccgatttgctgctctctattactcccgtgccagttcatataggctgcggatggattccatgaccgtatgccacgacaggtcggcggcataggaaaacttcttctgataagcccgccacagcttttccatgtttgggtcggcctcaacttcatcaaaggccgcaggcgcgtcggcaagatacttctctgtaccgcgtttcctggccgttgcaatgagcgccgcacggagatcggctgggacgatgctctggccgtggagctggctcagaatgtgcagatcatagaaatctctcatgcgggtgttggtggtggcgcgggacacgacagtttccagcttctcagccagaacagtttccagattgtacgccaaaatttcaatggaacgatcctccagcatcagcttgaagctgtaacgcacttcgcggggcgtgatggcgtcgccggtggaaatgtcgatcttgagcggcgttatcacgccgtcaaactccgtttccatgctgacacggatgcccggatactcggcctcgtccatgatctcggaaatgcgcttcacccggaaccccacgccatcgtccaccggtacggagatgatggaggcaatcatgttctccacgtcctcgatgccgaccgtcgcaccctttacggtcgcgtcaatgtccatcgtggagcgggcgtcaaggccgaccattgcagccaccagcatcccgcctttaaggatgaacttgtcccgatattccgaaagagaaatgcgctccagaaagcgctccatcatgtaattgcgcatcaggatttgcgcatctgcggatttgtccttggagagattgcgtatcaggtctttgagctgccgtgcagtcttaatcataagagtacctccaaatactgccgaagcagtttttcaacacggaacatctgcgcatagcgcatcagcttccgcaagtccttgtcttttcgttttgcgtattgcttgagtgcatcctgaaaggtctgcatctcgattccactacggctgcggatcagatcgcagatggtacgctccatatcatagacgggaaccgagttgccaaagggcgtgttcatcgtgacgatccccacatcatgcaattctttcttgatggtgtagaccttgatgccgtctgcttgcaggctggcaggattgtagccggtcttgaccgtgatggaatacggattcggctcccggtcggtcaggtcatggaaaaacagcgcgctctcatgggagaatacagcctgcgcacaacgaaggtgcagcaggtacatggcgtccgtccatgcatctggcgaaacataaacgccatgcgcggcctgctctacgccgcgctgcttggcgtaggcgtaaaacgtggacttggcaataccgatttccaaaacctgcgcggttttgacgatcccattgttttgctgaaaaagcagatcaagccggtcgtaggcggtcatgttatcacttccttcttgctaatattatatccgagattagcaagaaagtaaacaacgattttagaaaagcaagccgaggcatcgccccggcttgcgctttaactatggatgaagtttttcatggcagcgttcacgtcttgcagcttgccaagtccctgcaccgccagcagcggaagtcccatcgggctgattagaaacgccagcacaaggaggataatgccattttttacagagtaggtaatcatcacggcgatggccaacagggagagcaggccgcttgccagcttgaacgcgaagccggagcaagacagcagccccgcgcacagccagacgaacagggacaggataagcgatagcggcacaaggataattttcagaatggacatttgacggcctccttttcaaagacgttatgcttttctaatatcagaataccatgacagcgcgcgctttgcaacaatgcgaggcttttgctttgtgtgaacaggggcggcggagtgaccgccgcccctgcgacttatttcagcgccgccagcgaggaaacgattttctctgccgccgtccatatccgttcctgactttgctgaatgtcctccaaatcggcctcatagatgcggcctgtttcgtgagcgcggcgggtaagctggttgaggttgttgctggaataccgaagcagggacaccagctcccgcagctccggaaggtcgagcttcaccacatatccgtcaatcgccatcttgcggagatacgccgccatgttggtggtgccgaactgcgccatcttcgtttcaatcatttcccgctcctgcggcgtgacgcggaatttgagctgaatatcccgtttgcgctttgccatcgctcagcgctccggggctttggacttcgccgaaattttcggcgaagttgtttcaggcggctttttcagcttatcccggacagaggttttctgccgctcctgtgcgtaggctttgcgggtctggctgagaaacagatccaccagaccgggatggctgttgacggccagatagcagttgcggtcagtaccccatgtgtcgggattggcggggatggacatggcgtttgtccatgcccggttgtcgggtgaataccgtctgtcccaatccgcttgacagacggtaatggcgaggatataaaatgcgcggtcatagccgaactgctgcaccacctgatcgactgccgctgcatccaaccggttatcccggtagtggtcacggatggcggtttcaatcgcttccttgcaggccgtgttcgcttgattggaagcgcggtaggccgcaagctcgtcatgctctctggcataggatgccgggtgtttgtaaacggggagatttttcattatcgtgcctccatttcttttttgtggggcttttccggtgtgccatgaacgggcggcgctttcagcctgtccagaacggaaggccgcgtcgattttgcaatcgcctgctcaggctgcggctgtcccttgccgtccagattcagttccatatccaactcaatcagccgcgcagttttcgcggccagctcctgctcctgcgggaatggcttaccgacctcagcctttgccgctgcctgctggttatagaggttttcaagctgctcctgaacgctgcgcagacgctccggcattttatccagcgcgttctcgatgcggacaaggttgcctctggcatccgaaccgagttcaacgcgatgggtcatctggcctttcagcgtcagcgtgtacgttttccaaatggaatcaaaagcaacggacatggtaaagccgcgatagctgccgatctgtaccgggtctttgcccttgacctccttgcaggtgtccagcagtgcggcaccggcgttttccttatcggtgagccggtcgccgcgaatctccatgccgacaaagccctctgccgggagcggatgcgctgcgagggtctgcatatccgcctccagtccacgaacaaagcccttgtgttcttctatcttttccgggaagtatttcagcagactgtcctccaagcggaattgcttgctgttgtggtctgccttcataattttgagcttggacacctcgatgtccaaatccatacgctctttgatgcggggatcaccggcacagagcgccttgatctccgcaaaggacagcgccgtggcgtccacatcctcacaggagcgaaccggggattttgaggtcatgatctgagagatgaatttctgcttattttccaccgtttgccagaggtaggcatcaaacgtcccctcggtcacatagcggcatacatgaacgagcttgttctgattgccctgacgctcgatgcggccttttcgctgcgtgagatcacggggacgccacgggcaatccaaatcgtgaagtgcgaccaaacgatcctgcacgttggttcctgcgcccattttggccgtgctgcccatcaggacgcgcacctgaccgctgcgtacttttgcgaacagctcccgctttttgacctccgtattggcgtcgtggatgaacgcgatttgttccgggggcataccggcgtcaatgagcttttggcgcacatcctcatagaccgtgaacggcgtttccgcgctttcctccaatgaaatcgcactctccagcgcatggatttccgggctgtccagcgtaccgggggaagcctttgccgcccgctgtgagggcgtggtctttggcgtagaaatgtcgcaaaacacaagctgtgtcagtttttcctcctcgccgtcacgccagtattggagaatgttcgccacgcactgattgaccttggtggtttcctcgtcggggagcatgggattgatgatgcgctggtcaagccccagcttgcgtccgtccgaggtaattttgagcatattgtccacatccgggctgaccgcaccgctgtgtaccttggacgctcgttccgagagggctttcaccatgtcctgctggatctgcgtgggtttggtggcgatggtgtggtacgcaacctccggcgtgggcaagtggagctgatccgccgttttgatgtcggcgacctctttgaacaggttcatcaattcgggcaagttgaaaaactttgcaaagcgcgtccttgcccggtagccggtgccctccggggcaagctccagcgcggtggtggtttcaccaaagcggcttgcccagcaatcaaagtggcccatacccatctcttgcagccggtcatgctgcaaatagcgctggatggtgtaaagctctgtcatggagttggaaaccggggtgccggtggcaaacaccacgccgcgcccaccggtcagctcatccatgtagcggcacttggagaacatatccgaggatttctgcgcatcggtggtagaaagccctgccacgttgcgcatcttcgtatagaggaaaagatttttataattgtccgactcgtccacaaacatcctgtctacgccgagctgttcaaagtaaatcacatcatccttgcggtcgctggcttgcagctttttcagccgcgcctccagcccctttttcgtgcgctccaagctcttgatggtaaagctgttgccgcctgcgagcttggtatcctgaataccatcggtgatttcctcaatctgctggtgaaggagctgttcctgccgctccggactgatggggatacgctcaaactggctgtggccgatgataacggcgtcatagtcgccggtggcgatacgggcgcagaatttcttgcggttgtgggtttcaaagtctttcttggtagtgacaaggatgttggccgaagggtagagccgcagaaactcagacgcccactgttccgtcagatggttcggcacgacaaaaatggatttctggcacaggcccaatctcttggattccatcgcagaggctaccatttcaaaggtttttcccgcgccaacttcgtgtgccagcagcgtattcccgccgtacagcacatgggcgatggcgtttttctgatgctcccggagggtgatttccgggttcatcccagagaaaacgatgtggctgccgtcatactcgcggggacgagtgctgttcatttcctcgttgtattgccgtaccagcgtttcgcgccgctccgggtctttccaaatccagtccttgaacgcatcccggataagctgctgtttctgcgcggcaagggtggtttccttggcgttgaggacacggcgctcccgtccgtctgcatcctcaatggtatcgtagatacgaatgtcgcggagattcagcgcatcctccagcagccggtaggcgctggcgcggtctgtgccgtaggtggtgaacgccgccacatcgttgtagcgcaccatgctcttgcgggaaacctgccattctgcggtgtacgggacatagctgatctcgatctgtccgcgcagatagcggggcgtttcaaaggtttcatacatgaattgctcgatgtacttcttatcaagccatgtcacacccagccgcacctcaatctcgctggcttcaaggtctttcggctgtgcggcgatcagggcatccacattcccggcgaagaatgggtcgcgcgctgccacgcgctgcgcggtgcggagcttctgccggacgttgccggagagatattcgtccgccgtttgccagcccttcgcccaatgctcgccgccgtcctgcaagtcaaacgggccgctgttgggttccttgtaaatgacacccttcaaatcctcaacgatctgcgggattttctcgctgccgcccatgagggaggccataaagtcgagatcgacgcaggctttttctccgatgcagacagcaagggcttcactggcggtatccacagaatctacgctgcgctgctgcttgatagtgcgcttgtggaacatatccgccttgcgctccagctttccgtcgtcatccagcacttccagtgaacacaggaggtagtaagaggaatcgtcagagaacgcaagacggttcgcacggtcattgattaggccatgttttgcggagaacgcatcatagaggcggtttagctcggcctgtgcttcctgaatccggctttctgcgctgtactcgtccatttgcagggcaatcagctcattcacgcaatcccgcagcgcgaccatgcccttgacacgctcggcggcggtggcgttcagctccggtttgaccatgcggctgttttcccggtaatacacctcgccgcccaccacggtgtaggagtagtttttcacattggggtctgcggggatagacgtgtcgatctgttcgccctcacccagctctggcagttccgcctcctgataggtgccgcgaatgtttttcacggcatcatggagctgatctgcaagtttcagcccctcaatggggacaacggtgaagtcctgcttgccgtattgggtgctttcggaggtctgcctgcctaaaatcatctccgggtggtcaacaaaatagcggttgatggcaaagccatcctcgttctggccgaggtatacccaatccggttcgatctcaatgggacggtcacgcttttggagaaagagaatgtccgaaaccacatccgtaccggcgttggcgcggaacgcattgttgggcagacgaatggcacccagcagctccgcccgctgcgcgatgtacctgcggacttcgggcgattgcttgtccatcgtgtagcgggaggtcacaaacgcaatcacgccgcccggacgcacttggtcgagggttttggcaaagaagtagtcgtgaatggaaaaaccgagcttgttataagcccggtcatctacctgatattgtccgaacgggacgttgcccacggcaaggtcgtaaaagtctttcctgtccgttgtttcaaagcccgcgatggtaatgtccgccttgggataaagctgcttggcaatacgtccggtgatgctgtccagctccacgccgtagagcttgctgccctgcatctgctccggcagcaggccaaaaaagttgccaacgcccatagacggctccagaatgttgccggtctgaaagcccatattgccgaccgcttcatagattgccttgatgacggtggggctggtgtagtgggcgttcagcgtggacgctctggccgcagcgtattcctccggggaaagtgtggcgtaaagctctgcaaactcgtccgaccagtttggcttattctcgtcgaaggcatccgcaagaccgccccagcccacatagcgggagaggatttcctgctgctccgggctggcctgtaagccctcaaactccagctcttgcaggaggcgaatcgccgccatatttgcccgaaactttgcttttgcgccgccgacgccgagggcatcatcggtgatgtggaaattctgcgcgtcgcggtggcttgccgccttgaagtcagcgtaagcggcctgctccgcagcggcaacgctgtgaaattcctgccactcgccgtcaacggggatggataccgcaggacggtgtgcgggaggctcgtcgatctcggcctgtgagatggcatcatcaaaatcaggcacaaactcgcccatttccgagagtgccgctcgaccttcatgctccagaatcagcctttcttcctcgttcatagcaggaggttcaggcttggcgggttccgcagagggcgggtcatgctccggctcgtcaaagcgcagggtgcgaatctccacatcataggggaggttgtttttgtcagcgggatacaccgccacggtctgctcggtgtaggcgggtgcctgttccggctgcggataccgctccatgagccgtgcgaagctctccctgctctccgcacgggaaacgggatagcgaagcgacggatcgcggagagaaatatcaaaaagaccgatgctctcaataataaacggcttgccgtcctccaaatataccgtatcgcctacggaatacgggaacggttctctctgcgggacaggagctgtttcgggaacgtctgtaactgcttcctctggctcatgccagcggtattgttccacatcctcatccgaaacatgaatgaggtcgctgaaatcgaggttttccagctcgttggtaataatctcttgcaaagagccgtactgccgggtttccagatgctcgtcatccagatagcgctccagccggtaattcacaaggtcaatgttcacctgaatgggaatctcatcgtcggtgacggtggtgtaagcgacgccaatcttggtggggtcgctgaaatccgcctctgagccgtattcactccggcagaagtcggagatcagtccctttgcacgttccatgagcgcctgctccgcaacacgctccgcatcctgcatcacacgctggataaatggatcgctgttcagcttttcggggtcaactactttgccgcccacgatgccgcgctcggcgagggtttcccgaatgacaacagggtcaatatcatcgaaattgtcgcgttccgcctcggtgtagaatttatcctcgcggatgagctgcgccagtcgccgctgcaccttcggccatgtcagttcggcggtttccgggcttccagcgcggacgataaagagattgttgccctccttgccgccgtactcgtgagcaagccatgcagcagtttctttttcacgtccgtgctgctgcatataccgcactacggcgtgtttgctctcgatatttctgttccatgcacggagcgcatcgtctatatcgtcctgcgagagcggtcgcagcagatcgtgaagccgctcataggttccctcaaaaacctcctgatgtaagcggctgcggaattctggaacatccgaaaatagccggataagctccatatcttttgaattgagaacggcacggcgcacagcggcattacactcgatttccgcattttcccggtcagagtgaccgcaggcgttgcgataggccgtatcctccgaaaccgctgccatcaccaccggcctgtaatgctccaaacgttcctgcaccgtgggctgaacttgctctgcggcggggtcgcggaacaccctcgtgccgtccgcgccgaactctgcttcataagcattgatggcggcttctgcttcatggtcaatagagcgcagcgtgtaaatgtggcgctcacccctaaagtctgacgcttcggcaatcgtcacgtcgtacttatcgcgcaatttctccacatacatctctaaattgttcgacggaaggccacacatttccacacggccagcgccggggatattgcgggtggtcaggttcatatccagcagctccgccgcctgttttgcgtcctcgccatacatttcaaagaaatcccccacctgaaacagcacgatgttgtccgggtgggattccttgatggcgttatagctgtcgtaggcggtgtttcgcgccacatcctgtgcctgcgccttatcataaagcgcctgttcgtctggtgtaaaatagcggttcatccgaatcagctcagagatacgcgaagcgaccttgttccaattcatctgaacatctgcacagcccgcttttttcaacgtgatgcctttgctgccgtgatcttcatagctgccgctttctctggatacggcatgggtatgcccgccgatgccgtactcctttttcagaaaatcggcattctccttgggggtgtgcgaagtctggaaaaacgcatagatgcgggcctttccaccctcaaagctgcttccgtttgcaagagaagccgaaatttcatcttcggtgataaacctgccggttgctggaatagcctccatatcggaacggaattcctttcgtggaagggacagatcttctaaacgtgtgagaagtgcctgcggccggtggtaatggaagcgcagcagcgcacggttttcgcggtaggcgtccatgaataccttgtattctgacaggagcctatcccggaacgccggattcagcagatcgtccgtcagacgctccgtttcctctggaaagctggtgctatggatattacccaagcaggacagataccccagcgactttgcttcatccgagaaatcgtgataaaggttccagacatccgcagcaatacccagccgctcatagcgcggggcttccgtgacctcaagattggtggcaaatgcgccgccgtccagaagttcctcaatatgctccgccgcatctgcccagcctatcacttgggcagaacgaagatagcgagaggtatctccggttgcaatatggataccatcgtctccgtaccatgcggaaaacctgccgttatccgtaatcaggccgttgccgccgtagtagagctttttgagaaataccgcgcgatcctctaaaggcttttgcttggagaattccgcagcaattttcatccgcgctgcatccgcattaccgctcgtgcgcaggatgtggtcaatatcatcctgagaaatgaacatagaaaaagcggagggtgttacactctccgcttctgcgatggattgaatttgttctgcctctgaggggaagaaggacatctgtgccccagcaggggcatcgaacatatttagctgaacaccagttccgtgaggatcgtttcctcggcctgcgctttcagcgtgttcatcagccctacccacttcatcgggtcgctggctttcagcgcttccgtcacgcccgctgacttcatcagctccggcatcatctgttccagtcggttgttcgctgcctcgtcgatctcccgcagatgggggtacagcttctcggacagcagcaggctgttccacagcaccggacgatgctccttcaggtaatccttccgcatcctgccgtacttgcccagcggggcttgcggctgctcggtcaggctcagatcgggaatcagataatccccgctgcgggtgtaggtcagttcgctcatggctttcgctcctttccgcgattttctcgcgctcgtaattcttgatggtgacttcgatctgccgcagcaccagctcgctggactggctgatggccgttccaagggcggcgacggtctgcggggtgttgaaatcaaagacgttcagaaaatcctcatgctcgaagtaatctcccggctgcatcccgcagcgggacagcagcgtataggtggtgctgacaacggcggcgttccgaaaagcggctccgatgttgaactcatcatagtcctccaaaaaggagccgtcaacgatgccgacaatatcgcgccgattgtcgtgccagtattcatctacaagctgcgccgccacacgctccaactgatcagcaagtccgttttcaccggaaacatcgaagcgctgttccagcgccgcagataccacctcacgatgctcttgccggtattcccaaagataagggcggcgagagttctcgccgccgctggtgtcggaaacatcaaatacatatcggagtttgggttggtcgctgctggtatccacaagggcgatgcccttgctgcctcgccgcacatagcggcgcatctgcttattccaaaggtcgtattccgcgcaggccgtggcttccgggcgctgggcgaaaatcatgagctgttcattgtaggggtacttatacagccttgcggcggtggtcagaaatgccgtccacttctggtagcttcccgtgatctgctccgccgtgcggtctgccatctgcgcatagagctgtactttactcggcatccatatcctccttttcaaaatcggggaacaggtcaagcgcgtcatattccgcgtcgctcatcctgcgcagctttgcgatggcgctgtccgtcagctcccgcagctccgtttcatccgcagcgaggtagccgcgcatttcctccagcgccgcgatcaagcccgtgcgggtgccggtgttgtagaggctcataagttggcgttcttcaaaggtgatgttcatatcaaagctccttttccgcgctctttttgagcgctgttttgtgtggacgttcttgggccggttggcttttgagctgctccagtacagatttcttcttttcccggtgtgccgcctctgccaaatccatcaaggagatggacataccggccttgacctgtgcttcaaggtcggcgacggtgggctgtttggggccgttgttgataatgccgtcgatcatgccgtaatcgtcctccatcgacatctcggcggctttcagataattctccggtttctgaaaggcgggcagctcctgaaatcccgtgctgtcacagtagtgataggataccttgccgtcctgtttcagcgcaacgatgtcgctgacggagaggctgtgtcccacaaaatcgccggggcgctcgtcgttgaaaatgtagtagaagttttcaaggattctgccggtatcatcgtccgggtacacctcacgggtatagacggcttcatagttggccgggtcaggcggcgcggccagactgccgaggttggcaaaacgcagctccaccggcgcatcccggcgcagttggtagatcgccatagaatcggtgggactgttcaaaaaacgctgctccacatcgcggggtgggatatggcccttgaccgcatcccaatccggtcttgtgacgccgaacattccgtcgtgcttgatgatgtcctcggcttcaaagaccatttcctcggtgttgccgggatggagcatataaaccgtgatgtcatgttccagaagctccactgcccgatccttggaaagcgggagcatatcgctatccagatacccatagctgcgcatatcatccaccgtcagcgtggggtcaggcatcgggacggcctgttccagctccgggagcatattatctgccgcatcggtgggaacagcgactgcgccggtgatctgttcaccggcaccgaggggcagctcgtttgcctcctgcaagtctttcaacagctccagcggcgcaaggcggatcggtgcggcattgccaatattgtggagcttgcaaattccaagcgccgctgtggacagttgctgttcggtgccatcgagtacgccgccatccagcacttttgcggaaccggcgtcatagatggtgtaatcaatgcctgtgtcgctgcgctgaacgtgaatgtatttgtcgttgtccaccatgtagagcttttccgcctctggcgcttccacacttggctgttccgcagcggccaaattctcccggtctatgccgcgctccttgcaaatctccgcaaagtgccggtcaatgtccgtaatcagctcggatgccgtcttattgatagtttccagactggctcgaagctctttcagctccttgccctttgaccatgtggcgatatagccgaagctgttctctcccgtttcaatgccgtaatactggcagaccgcataggaaatgctttcggcctcgacctcctcggtgttgcggctcttttcaccggggacaaggatcgtctcaccatcgtccgcaagctccgtcatgtgttcatagtcgtggagcttggcgtgggcaatctcatggacggcggcgcataccgtctgcacctcactcataccggcgcggatggtgatgctctgcgccttaatgctgaaaaagccgtccgtatcccgcgcaacgggctttatctccatcggaacgggagaagcacggcgcagcgcctccatgaaaacctcatactgctgcacattgccgctcagatcggcggcaagctggggcaagggctttcccgcagtctgcgacacgtcaaagacggataccaccttgaacatagggatacggatttccttttcctcaatgacggccttaccgtctgcgtccagtatcggcgcgttggtttcggggtcggtcttgatttcctcgacctttttcttatagggagtaggagcgatgatgcggatacctttttcgcctttcaggacgttcctgccgaactgatcgcgccacttgttgaagcccgccacatgggttgcgtcggggcgctgcatatagatgagcatggtattattgaccgagtagcggtgaaagcggctcatggtggcaaggtacttccggtacttatcgctctcgaacagctccttgatgccattttcgatgctgtcaacgatctcccgcatccggtctttgttggtttgtttttcagccatgatgatctcctttcagaaaaaatagcgcccctgcgcagaagaaaacacatcctgcacaggggcaattctccgcagatagaggccgtttttgcgcttgcggatagaatgacgcagccacttgcaatccggcatggaaaaagccttgcggcacggggctttcccagtctctatttgcggaggttccagtattgtttacgcttccgtttggcgtcctgctttcgacgctcctgcttggcgcaggcggggcaatatttggtgcgattggaggaagaatagaccggcttaccgcagacggcgcagcgctttcccggcctttcccgcatcacgtcggccagcaactcatggtcggcgggaagtaccgcgtttcggaaccagttgcacagcagcgagtaggaaataccctgtacgcagacgcaaggctctccatcatccagcgcgaggcagttgccgtgatcgtaattacagcagagcttccgaatgagcttcttggcgcggcggagctgcttgtgatccatacgcggcgcatcagccattgtcgaacaccagcttatagcccgtgtgctgcccatcatcctccagaagaacgacggcatcataggttttcccggttttttccgagtagcagcctttcagcggggcgcggccatttttcaaaagcgcagcggcaagagatttcgtcagcgcctttttcttggcggtgaaaaagcggctgtttttccagagaacaaaggaacaggtgcggttctcacagaaaaaacccttcggagatcccgtcacctcggctccgcagcggggacactggccgaccgcttcacgcccggaggggaacaggacttccgtaccggggatgggtttgtaggtctgcaccagctcatgtagcatggcggcaatcccatccatgaagctgtccggggcgatttcgccgcgctcgatctctttcaggcggtgttcccattcagcggtgagctgcggagactggagctgttcgggcagaacggtgataagcgccgtgccggtggaggtgggcagcagatttgtgatcttcttggacttcctgcgctccacaaaaccggaggacaccagcttttcaatgataccggaacgggtcgccggggtgccaatgcccttgcgctcggcatcatctggcatatcctccttgcccgcgttctccatcgcagccagcagcgtatcctcggtgaaatgcttgggcggcgtggtttttccggtcttgaccgatgcggcagatacggaaagcgtctgttgctccgtcaccaccggcagcgcgggcgctgcctctgcctgctcctgctcatagcgcttccagccgggtgcaaggacggttttgcccttggcggtgaagctctgaccggcacagtccaccgtaatgaccgtttctgcgtagcgatgtggttcatccaccgcacgaagcaagccccttgccgccagcttcagcacctcgcgttcgcccagcggcagagaggctatatctaccttttccgcgctgatggtgggaacaatggcgtggtgatcggtgacttttttactgctgcatacctgcttggcgcagatggtcggcggcttctccatgccgcagacagcggcagcggcggcgacaaggccggggacgctgccctccatatcgtcggtcaggaagcggctgtcggtgcgcgggtaggtacagagcttcttttcatagagcgcttggagatagtcgagggtctgctgagaggtgtagccgagaacgcggttggcgtcgcgctggagggaggtcaaatcgtagagcgcgggcgctttctcagacttttccttgcgctccacgcttttgacggttactgccttgcccttgcaggcgttggcgatggcgtcggcatcctttctgtccttcattcggcctgtcgtggcgggaaagccgcaatcgagctggacggtgtagaacggctctgccacaaatgcggagatctccgcctcgcgctgtaccagcagcgccagcgtgggcgacatgacgcgcccgatgttcaatgtgcggccatacgtcagggagaaataccgcgtggcgttgataccaaccagccaatcagccttggcgcggcacagggcagattgatgcaggccgtcatagtcgcgcccagacctaagctgctggaagccgctgcggatggcatcatcctccattgaagaaatccaaagccgcagaatcggcttggagcatcccgcaaggcagtaaaccgtgcggaagatcagctcaccctcgcgcccagcgtcgcaggcgttgaccacctctgccacatcctcccggcgcatcagctcccgcagaatgtcaaactgcttctgcttttcagagcggacgatgaagcggaacgaggtaggaatgatgggcagcgccgccagcgtccatttggcatcatcggcattgtaaacggcggcgtcggccagctctgccagatgcccgaagcaccacgacacgatgtacccgccgccctccagatacccgtcataccgtgattttgcacccagcacggcggcgatgctctgcgccacggatggcttttcggcaatcacaaggcgcatggtgcagcctccattctctttacgtcacggtagcaggggcgaacgcagctctgcccgaagcgcttacagccatagcagaagtgttccttggcagcggcgggagggctgtcctcccgcgctgctttcggcttctgcatcatcaggcgttccagcggattgttggtgaaatatctcatgcgtctgtatcctccgtagtatcctgttccggttcgtcctcatacggctcaaactcgtattcgtcctcatcctcaccgtagtcataatcgtccagatcggcgctgcccttggtctgcggcttggcctttttctgcttgaagatgtagaacgcggcaccgccgcccagcgcgacgatcagcagaacgacaaggatgccgcccacgccgctctttttctccggttcctcggcggcgggttctgtcggctcagcggggacttctggctttgcctccttgcccacgcactcggtcatgttgaccgcgcagacggggcaggatgtattgaccgtaccggccacgcatttggtggtgcaggagcaagtggcgggcgtttcttcctcgccggtcagcaccatcaggtcagcctcatccacctgatttaagaagtggacggtttcttcgccctcatcgtcacggtcaataatcatgtaaaacacattgccgttcttgctttccagcgtaatgaactgttttcctgccttggtgctggagccaatatcgtcgatcagcgtcagattgccgtccggtgtcagcgcgtcgctgccgcccgtcatgctgccgacaaggagctgccagaggtcggccagctctttttcatcaaacggaagcgtaatgccgccgatactcacggtactgtcggcggcgtcggtgacggtcagatagctgccgtacacatagcccacacgggcgggcagcaggatttttacccaatcgccgtccctgccaatcacatcgaccaccgtgccgttggggagctgcgtaaacgcggtgttgtccagtcccgcgccggtgcggacgttcaggttgccgccgttggtcgtgaccgtgccgatctgttttgtttcctgtgtgtctgcggcgctgctttcggcggtgggcagcgcatcatcaggataatcaccgccgctggcaaaggcagaaacggggagaatcccgatacacaggagcatcagcagcagactgataaaaatgcgcggtgtgttcttagtcatggttcaacgcctccttttccgaagtggccggtgcaggcgcggcctgcatacggcggaacagctcggcaaactgctccatcgtcatgccgttctcacgcaccatgccgatgatgtcggtgtcctccaactcacgaatctgcttttccagctcgcggttgcggccttgcagatcggaaattttgcctttgttcttctccagctctccacggagcttcataattttcggattcatattgttcactctcctttacggcaagcgcccatagcggtagaaatgggactgccaatagcttgaatttaagttcgcataagagatcgggtcgccacagtggatcatcatattgttgccaacatagatacccacatggctgacacctggggtatcatacgttccggtgaaaaacaccagatcgcccggcttgacgttggcagaggatacgggcgtacagatattgcaaagcccctgcgcgcccagtctgcccacatcccaaccggaatgattgatgacccaactgacgaagcccgaacagtcaaacgaggtggaggggctgctgccgccccaaacgtaggggtagccgagatacttttccgcttccttgatgatagcggcgaatacctcatcgtccagcgcctccgggggaatgtcgtagtcggtatagctgccctccacatacttgccgatgtagcctgaaccggggaacaggtcgggacggttgccgagggtggccatataggtggcgtacattccgagctgttcttcgctcataatgtagacgggaacatgggagagattgaagttttccagcgtgaccgtgcagatgtagtagtcatacggcacctgataggtgtccgtatgggtgttgccgtccgcgtctgtccatgtgtcggtttctgtgcggtagcgggtttccaccaccacatcctcggtcaaaatgtactggcggtcaaagagcatctggagcgtaccctgcacctcatccagcgtccattccccttgatgcagcgccgtaatcatggaaatgagtacataggggtcatgctcgatggtgtctagatcaaagtggtactcatcgtagtcatgggtgctttcgtaggtgtcgaggtagcgctgaagctctgcctccatttcgcaatactgcgcttccgcacccagcatatcggtgtcctgcgacggataggtactggccgcgatcccggagccgacgccatccattatcaccgagcaggaggacaggccgttgagcagaaatgccagcatcagcagaattgcggcggcaatggcaaagccgcgccggtgttcccacacatatttgcccgctttctcagccttttcagcggcttttttcgcggccttggcggtattctctgccgcctttgccgtagtctgcgccgcctgattgtgcttggcagcggcatactgctttttgatggcctgcttctgctgccacttggaaacgggattgctggtggggctgtcgatctctgctttcttctggagcgcgtcaagattggctcgttccagctttttctctgcacggatggcagcacgataaggcttgagctgatgggcgcggtgggcagactgcaccagccgcccgccgctctccacggcttgctctaccttgtgcgcggcctctacgcctacattgtcatcctcgctctgccgcacctcccggtgaacctgagagagaacaaagttggcgggggcatcccgcacggcatgggtcagctttgagggcggctttttcttatccacttcctcaaaacggagctgcgttttgaccttgccggtggccggatcaaagccgcgttcccttttgaccacggttttcttggggattttcgcctgcgccttatccgccttggcctccgcttttttcacccgcttgatgggcttttccagcttcggctcggcaagatcggcgtcggaaaactgcaaacgcggttctcttttcatgccgacgccacctcttgcggtttggtggtcatgacgcggtacagctcggtgtccttcgggaagtggtcaatgaagggcaggatcgtgttgccgtagaacagcagcccctcgccctcgccggagtgggtcacataagaaagctgatgcggcgaaatgttgagctgctttgcgagaatctgccggtcgccagcggcctgattgagcatatagatgaaatcgctgttctcaaaaatgttctcaacctcgcggctggataacaggtctttgacattttgcgtgatcccggtggggatgccgccccatttgcgatagcgcttccaaatctcgacactgtacgaggccgtctgttcctccttcaagagaagatggaactcgtcaagatagtagcgggtcgttttatgggcggcgcggttgatggtcacacggttccacacctgatcctgcaccaccagcatcccgatttttttgagctgcttgcccagttccttgatgtcgtagcagacgatgcggctattcacatccacgttcgtgtgatggttgaacacattcagcgagccggtgacgtagatttccaaagcagtggcgatgtactgcgcttctttttcatcctgcgcacggagggcgttatacaagtcctccagcagcggcatattctccggcttcgggtcattgaggtagtcccggtagacgatgcgaacgcagcggtcgatgatggtcttttccacaggggcaagcccatccttgcctccgacgatcaactcgcacagcgacagaatgaagtcggatttcaggctcagcgggttatcatcgtcgctgtaatccagattcaagtccatcggattgatgtagcagggcgaaccgtcgtagcccttgccggtgggcgacagcttaatgacctgaccgtgcagacgctccaccagcggcgtatattcgccctccgggtcacagatgatgatgtcatccttggggcagatgagaaacgcattggtgatctcacgttttgccgaaaacgacttgccgctgccgggagtgcctaaaatcagaccgttgggatttttcagcagcttccggtctaccatgatgaggttgttggaaagggcgttgatgccgtagtacagcgcctccgaaccgttctggaacagctcctgcgtggtgaaggggacgaagatcgctacgctggaggtggtcaagccccgctgaatctcgatctgattcagccccagcgggagactgctcatcagtccttcctcctgctggaagtccagccgggtcagcgcgcagttatatttctgcgcgatgctggaggtctggaagatgttgttgtcgagctgccggggcgtgtccgctgtgttgagaatgaggaaggtcagcaggaacattcgctcgttgcgggactgcaaatcctgcaacagctttttggcctctgcgccgtaggtagcaaggtcgcttggaatgatgtccatgtcgtacccggcgcggacggcttttttctgttcttcgattttggatttgtcgagatcggtgatcttgcgcttgacggtcttgatggcgttgacctgatccacagactgcacatggagattgacgaggacgctgctctccatatccagaaaatccgccagcatccggtcgttcagctccggtgccagaatctgcacgaagctgaccgcgcccagctttttgcccatacgaaactgcctgccggtcttgaactcaaaggagctgggcgcgataaagtccttagtggacagcccagagggagccagccagtcccacgaaaagcggaacggttcctgctcgtccatccgcagaatgtcgtgcatgacgtgcaggcgctcaaagccgttcagcggcgcagccacaacgcccagccgcttgaagttgttcaggaggtcggtttcgatgcgctccaaacggggcttggcagcgcggaggttgtcggcctcaacgccgaacgtgagatacttggtcttaatgaggccgttgttgccgcgggcaagctgattttgcagcataccggcgtactcggtgcggatgccgtcaaactcgtccccgcagggcggaatggaaatgctccgtgcaaaggtttcctgcgaagccgagaggttcacaaaggaaagctggaattgcacggagctgtcaaagtagttcaggaaatcgcaccacgcctcaaagatggcggtcttgtcctcgttctgcgagagctggtagttgatgtcctgatactggatcgttttggtgtagcgcgtgtcggtcacacggcaaataccgtccggccacatacgctgatacgggatgctgtcctgcgccgatttttctttcttatccgttcggttcgctcttgcgatggcggcttcgatctgttttcgttcggcgcgggtcagctttttcttttcggacaatttgatacacctcccggtctaactggttttgccgctccaaaacggcatagaaattgttggtcttatacgggcgctgcttcggcctctggaaacacacgcggtagatgttgcggatgacgacctccaacggctgaccgttcttttcatacatggcgaacagcatagccgggatcatcaccaccatcatcaccatggcggcggggctggtgccgatgctgcccttgagcaagaagaaaagcggtacgccgatgagcgcgccgcttccgaagcagatgagctgtcgtttcgtgaggttgaataataccttggtcttaactttggttaagtcctttgggacgttgacataggccatagaaatccccctttacaagagcttttcatatcgaagtttcatctgcgccgggtacaaagcggaggcgggcttacggctgcctgtccagcatttgccgcctgccaagcctgcgcagctccaaccagcggcgcggagactgctgccgctctcgctatccagcgtataggtgatgatcttgcggtatcccattgcctttgccgcccgcgcggatgcggcataaaggatgctacaagcgttcttctcaccggtggtgcaaagacgattgacctccaatgtccagccatcatccagataccggctcacaggacggcctacgattgcaacaccgacaagctctccatccttggcacagccgatggaaaacttatgtccagcagttgccttatggtgccggtgatgcgcattgacaaatgcgttcgctgttgcaagcgcgacgggcgtgagtgtcagcatggtatcacccccgttaatgtgcattgaacacggacttggcaaggctgctcgttttgaacaggcagaagcacagcagcaccgtgtagcccatgcaagtccagatggcgtagatgatgtcatccacaagcgcgatattctgcaccagaaccgcgtaaatggcaacgcagacgataatcaaaaacgcttggaagcccagcgccagcagggaacggatgtaattctgccccatgccgccccattccttgcccatcatggtcgccattgggatgggggcaacagaggtgacgagatatatttcaatcattcttccgaatgtgataatgaaaatgcagatggtcagcgcccacatggtaatgccaacgaacagtgactggaaccacaggccgaacagtggccccagctccatttccatcagccgatcctcaatgcccaccatgacgcttgaaatgttgatgctggtgtcgccgataatcagcccggaggcgctggcaacgacgctttgggcggcatcgaacacgcccatcacaatcgtccatgtgtttgttacaatcaggacagcggcagcggacttgaacgcccacttgaagaatatccatgtgtccatgtcgttgaggttatttttgtcggtaatgagctggatcagttccagcgtcatcacaaaggcgagaattgcgcctgcgatggggacgatcacggtttccgacaggttttgtatcatgctgaaaatgctgccgttccatgcctgcggcgataagcccacctgaccggagatctcggcaaccttttgattggttgcatcgaacatcccggacagattgctcacgataccgccgatgagcatttctttcagccattccgtgatcttatcccataagaaatccatagggttgccctcctttcgggaggatgccgccagaaagcggcaccctccgtggatttatgggaagcaaacgagctgccgattagccgaacagaccggacagcagcggcacgagggtaatgccgattagcgccacgccgccgcccgccataagctgcttcatgccctgagattttgctaatgtgtgataaagaagcattagaagtgtaaaaaattttgccgttcctatccggcacttggccattgtgtcggataggtcgggcggttattcgggcaagtcaatcttgccgacaaagctgtaataaatctcaatgtcctgcctgcgggtgccgttctcgtcgtaactgcactcatgcaccacgattttctctaccatttcccgcaacagggtgggggtcagttcttcaaaggcaaggtgcttgcggacaatgcccatgaatttctcggcgttgacggtggcggcctgcgacttgtccagttcagcttgcagggctgcggctctctttttcagttcagcttgctcggcttcataatcagccgacagttccatgaaacgctcgtcgctgattttgccgtttacattgtcctcatacagccgcttgataatccggctcacttcggcaatgcgttcctgtgcctgttcaagctgcttggtggctgcggcggtctttcgcttgccgccgatctcgttctgctggacaagcagtttcacaaaccggctctcatgcttggctgcgtattcggtcacttgccgaagatttgccaggacaccggcggtcaacaggtcggtgcggataaagtgcgccgtacagtcgcgggtgcgcttcttgtagctgccgcagatgtaacagtcctgcttgcggtctttgttctgataccgctgctgatacagcacatggccgcagtcggcgcagaataaaatcccagagaacagccccacttcatcatagcggttcgggcgtttgcgctgcttgcgtaactcctgcacacgctcccatgtttccatgtcgatcagcggctcatggtggttctcaaaaatggcctgcttctcaatggggttctctacgctgtgcttgaccttgtaagagggcttttccgtcttgaagtttaccagacagccggtgtactcccgattttcaaggatatgcacgacggtgtttgtcgcccacttgcactcatagccggggtggtaacggcgggtgctgcctgtccgctgatattccagcgtccccggcgtggggatttgctgctccgtcagcatacgggcaatcttggtcgggccgttcccggcaaggcaaagctggtaaatctgctgtaccaccggggcggcttcctcgtctatgatgaagttttcgtcctcgtccatcacatagccgtaaaccggcttgctggtaacgggcttgccgctcatgccttttgacctttttactgccttgattttcttgctcgtatctctcaccagccattcgttgaacagatttcgcagcggggtaaaatcgttgtccatgccgccgtttgcgctgtccacattatcgttgacagcgataaaacgcacacccttttgagggaacagcatttccgtgtaaaaccccacttgcaggtagtttcgccccagccttgacatatccttgacgataacggttcccacttttccggcttcaatgtctgcaagcatagactgaaagcccggtctttggaaatttgccccggaataaccgtcgtcggtgtaccagcgcagattggtaaagccgttctgttttgcgtaggcttcgagtatccttttttggttcgatatggaattgctctctccttgcagttcatcgtctttggataatctcggataaagggcggtaatcaggttttgggtggcttgtcttaacataaaatcctccgtttccgacagccagccccactattccgtatttttatcataccacatggggcggctgtctgtatagcggcaaaagtgtaaaatctgcttctttatagtttataaaaaagagcgttcttttcatagggattatcatgaaaaacggtaattgaaaatccctttacttcatgctataatacgaaaagcgttaccagcgacgataatgcgggattttgtctgcaattcattgaaggaggtacaggcatgaagtttgaaaaaattgattgtggcaacggaattgcggttgccgtatcaagtgacagcatgattattactgatgtcgattctgcgcttgatttgcttatgtctgccaaatacgaagcaggcacaaagtatattgtcgtggataaaaagaacatcattgaagatttcttcattttgagcagcggcttggcgggagaaattcttcaaaagtttatcaattacggtggaaaaatcgctatatacggggatttttcacattacaccagcaagccgctgaaagactttatctttgaaagcaataaagggaaagatgtgttctttgttgcaacaaaggaagaagcaattcaaaaataagtcaaagcatttagtggataaaatccccatatcggatagttgtgtattaacccaacgcgaaagcggccatgtcaaagcatggccgctttttccatgcccccggctcatgccggataagtcggcttctgtgtagcagcggcttcggcttgcagcactttttccattttgtcgatggcagtttcggtgctgtcctgcttgaaatagccggacaccacaaggacagagttgcccatgcggattttcgtcacgcagtcggggcggcggggattggtttttgtggtctgttcgtaatctgccataggctactcctttcactcattcatcagatttttcagccgttccagcttggcttgtgcggtttccctgcggaagttgccgcccgtaaaacggacaggggcgcacatttccagcagccggtcatagatacgggcataggcggtgtcggttgggttctggatttgctgcaaggtcaggttggtggtgacgatcagcggcctgcggctgcggtatcggctgtctatcacgctgtaaacctgttccagcccgtaggcggtgtcacgctccatgccaaaatcatcaaggataagcagcggatagcggcaaagccgggaaatgtattcgttcctgccctcgaagctggcggcaaggtcattgaggatagcggcaaagttcgtcatgcggacagggattttctgctccatcagggcgtttgcgatacagcccgcaaggtagcttttgccggttcccacaccgccccaaaagagataaccgatgttctcggcctgcatggtgtcccaatgctccgcatagaaccgggcaacggcggtctgggggttcctgccgttgtcgttttcaaaagtccagtcccgcatggcggtatcggaaaatccccggcgtttcaagtcctctacggtgtcaaggtgtctgcgctgctgttcggcggcttcacgctcaatccgctgcgccctctggcagtcgcactctgccgggtggcggtcaagcccgaaaagcgtcttgccctctgggaaataggcttctttgggcttgcggcattttccgcagtacagcaaaccgtcctcgcctgtgtagtcgccgctgtccggctcggtatccggcagcagattgatattctcgattttgttcataaactttctccctccttgcaggtgtagtccgggacaccctgtttcggggcgtcctttttgtcattctctgcccatatccgcagggcggcggcatagttctggtaggttctcccgttggcggcaaggtagcggctcatttcctcaatgagccgttccagtctgtccgggaactcggctttcagttctgcatactcggcttcggtcagaaaaacattctcatatctgccaaacggtttgtgcggctctccactcactcccattgtttggttttctatcaggttgtttatagtaaggttgttaggggtcggttttccgaccgtcataaggtcgcttttccgaccatcagtaggtcggttttccgcacttatgagggtcgcttttccgactgtcatagggtcggaaatccgaactaatggcggcagcttcacatacaggcggttggctgcggaaaatcccgcccgtttccgttccagaagtccggctgcgtccagttcgttcaaggcggctttgatggcggtctgccccttatccagcatttcggcaatctccgctatgggatagacaatgaatgtcctgccctgatcgtcctgccagccgttccgctgtgacagggtggtgcggtctaacagcagcgcatagagcagcttggcggtctgggaaatgtccattttcagcaggaaccggggatatggcaggtagggcggcaagcctgtgtccagccctacataaatggtttcctgcgtgttgtccggcttcatggcttcgcccgcttggagcgaaacggcgggcactcgatgatcatagcccggaaactctgcttgcaggtgcggcggcacttgcggcaaagaggattgtaggtgatacggttgcgctcattgaggaagaacgcccattcttccttgcgcttcttgctcattctcggcatggcggctcctttctgccgtttctatcgatgtaaccggataggcggcgtttggtgtatgatttcggtgtcattttcggggattttcctctctgtatgccccttgaaaaaggcaggtggtattgcggatagggtcagatatagggaacgcttttgtgcggtttcggtatcatttcggggtggagttcagtggtcaatttcccatagcaaaggggtgtccaaaatggaaccccctttccgggtaggggtggaacaaaacggaacacccttaccgctcccaatcccgacgcacctcttttgtccgttcctgccggagcatggcggcaaggttggatttgaccttttgcagctcggcggctctggctttctgctcccggtactcggtgtaaatcccgtttttctcggaaatcagggcttcattttccgcttgcagcttggaaacggcgggcagcttctttaagccctgttgccgaaaataccgcaccgccgcttcatacagcgtcaggtctgcatgaaacgcttcccggtatcgttccggcttcttggcagttttcagcccgtcatgggcgggcttggttctgcggtaaacgctgatctggtgcatgagttccttgttggcggtgattctggattccagttctttcagcttttctccggcggcgtgctgcccggaaatggcggcttccaaagctgtgtccacttcttcggggctggcaaaaccatgctcggaaaggaaattcatggtctttgccatctgtttgaggttaaaggtttttgcccaacgctcataaccgataccttttccctcggctcgcttggcggctatatctacaagccgctgcgggctgtcagggttcggggtgatttgggcgggttttgtccgctgtatgcccttagtaagctgcggctggtgttcctgtctgtcctgcatctttgcggctgctctatgggcgttctgctggaaaacagcaaggacagcggccttgtcgaagtccgtccccagcttccgggcggtgatgggctttgttctgtccggcgtgagataggacagccgcccccggctctccttaacggtcacgccctcccgcaacaggagagcggaaaactcgtcaaagctggcggcggtggcaagggcttggcgtatggtctgccgcaaacggcctttgtcggtttcaaacttggtctgtcggggtgcgataccctcggcaagcagcacagcgttttccttgtccagcttggcttgccccttgcgcttcgcccagtattcacgctcggtcactttgtttcggctgccgttcaagaggtcgatctggtaaagcccctcccggtggcacatctccatgacttcgctgcggaaataccgcatggcggctgcggtacagcggtgcttgttcccggctctggtgtcgcttgccctgtccatgtagggcttgcgctccacctcggcaatccgcagactgttgatgacaatatgcacatggatattgccgctatggttgtgcccgtccgggtgggtacagacaagggcttggtgtccgggaaaatgctctttgcagtaggccagccccaacgcctgcgcccggtctacggtcaggccattgtcggctgcgtcccgtgggtcaaagctgatgatatagtggtggctcttgatgtcctcccgtttgctgttcttgccgtaccgcagatttgcccggatacatgacagggcaaaatcttcctccccgcagttcagcgtgtccagccggtagtcctgccggggaatgagccgcccggcttcatcaagggtgggtttcatggtaaactcgtcatgctcaaaggtgagataggcttcggcggctccgtagtcggcatttttagagctgatatgcttgatcgttgccataggcttcacctatcactttcagcacctcgaatttgagggcggcaaggtcggaaacagcggctctcacctcactggacagggcgttgtagggtgcgccgtattcgttgagataccgggcgatctggttcaggttgctgccgattttcccgtactgcgccacaagggaagatatggcggtgagcatttcttcgctgtgggcagtcacccggataacaggagaaatccggctgtaaaaaacggcttgccggatatactcggactggctcatggagagggcggcgcatttgtcctcaaaggctctgcgctcgtcctcggtcagacgggtcttgacaacacatttccgcttgggggtgttgtaggttttgtgtggcatggtggctcaactcctttcaaactgcaacggacaatttttatctaaaacacaagtattggggcaagttttttcagcggcgcaagccgcaaaaggcgggtttggggtggcaaccccaacaagtatctgaccgggggacaaatgagcgaaaagcgaaatttggtacactggtcgatacttgctctccgtgactgcaaactttctctcacttccgtccgccacttttttggaaaactgcaaccacaaaagtttgtttctctttttctgctactactaatcctgtaaagggcattcctgcccgctttcgctaaaatgacaccggacgcagtggtttctacccggtgttggagaaatcctttctctttgccctctactacgggtaaatgctccaaatgccaaacaccagggcagaaaaattccctcctcgcttactactacaaccggcagggggcaaaatggccgggagcggagccggacaacaaaaaaagcagtaaatctttttcaagacttactgctttcgctggccgcgtcggtggcggctggtattcagtttttatgacttgtccggtggttcgtcaagccggaacttgaattgacagtcaattaaccgctgctttacatagtcctccacctcggcgttgacctgcccgttcacttttgagaaatagcggatatatccggcgtagtggagcaggacagcgttcacggcttctgggtcgccctcacgggctttgaggattgtttcataggggagaagtctactcataccggctcacccccatttcttcgcgtagccgctgcaaggcaagctggatatgccgccccgctgtgctgcgtgaccggccaatacacgcgccgatcacgcgctgcggctggcgcagaaagtaatagcgcaggatttcttcccgcgtctgctccggcaaaacagagatcgcgtcggcaagggcggcgttgcagagcaggacggtctgaccgcagacggtaaatgggtattcctcgtccggctccgacgcggcaaactggacaaacttctcgttcatcagatagtcaagggaaacttgccgttcccattgccgtttaagcttcaaaatcttgtccaaggcggcacagcggataacagtcttgcaaaaggcgttgtacctgcgctggatatattcttgataggctatctggtcggtcatggaaattcccctttctgaataatagtgcggggcggtggcacttcttgctgtcgccccttgattgcctaccagcaaaggcgggcggggctgtcaacggctgcgcatatgcgccgttcatcttgaccgttgactggctcggctgggtttgctatttacccgacaaacttgaatttattttaagctatcacgttttaccttcttaagccttactatcattaccataggaatttctttgttggttttaaaacattcttcataaaatccatcaatgacaaatccagctctaaaacaaaggttaaaaatatcttgtatggaacgatgataataaatctgctctttcggttgcccttcaatcgctatatcatagtaactgtgcggtgtcatatatttttcagtcaacgtgacaaaacaagggtgttgcgttgcaaagacaaaaattccgctttcctgcaacagttcataaacagccataagaagtggttcaatatccgtaatatccataattgccatattagaaactgctttcgtaaaggctcgatttctttttaattctaatatactttttctatcggtcgcatccgccacacaaaattcaatttgttttgcatattgtgattgccgtcttttagccaattctatcatttttttgctgtaatcaaaagcgacaaccgaagcgcctctttgtgcaagatacgaagaataatttccattgccacacgcaatatccaaaatgtaatccgcaggattaggagatagaagttccgttactttgggacgcactacctctctgtgaaattcattagattcgtcacccattgcattatcccaaaattgtgcgttctcctcccagatttttttactttcctctgttcccatgttctctcccactccccaaatttgcttttttgcttccattaaatcttccttactatattccattgttaccctccataacttctgattgttgccgtcttgacgattatgtatctttacattaccttctgaaacatatggcgcaccttgtccaggcggctgtttggacggcggggctggatgaccggctgaccgacagcggcctgatatcctttcagctctgtaaggcatacgctccgcccgttggtgtaaaaggccagatcagtacggtatgcctgtatacagcgggcgggaatctcgccagtaaagacaacttcatccttttttacctgggccgtttcgatggtggcacagtatttcggtgcatcatgataagccctggaaaggtattcctggggcgcatagaggatgaaggagagataaggttccagcagctgcgtccccgattccttcaatgcctgttccaatacaatcggggccaatgagcggaagtccgccggcgtgctgaccggactgtaataaagcccgtattcaaagcaaatcttacagtccgttacgttccagccgaacaagccctgctccagcccgtaacggataccatccctgacagcgttttgaaaactctggttcaagtatcccagcgaaacccggctctcgtattgtacaccggagccaagcgagagtggtgtaacagacagtcctatggatgcccaaaacgggttgggcggcacctcgatatggatggtgtggctggctgctttgagcggccgctccatataaatgacggagggttcctttaccactgtttcaagcttgtatttttccgacagcaaagcggaaacaacctccaactgcacccggcccaaaaaagaaagaatgatctcatgggtgatggaatccacttcgcaacgcaaaagcgggtcagtatccgcaagttgcgtaagagcgtccagcagccgttctctttgcgctgccgttttcggcgcaatcgtcgtccgcagcatggggagggggtcctcgcgccaccttttacgagggagccgggtttggtcccctaatacatcgtttaacctcacgctgtcgctgggaaggataacaatttcaccctgataagcggtgtctgtccgaacaatttcccctttggatggaatacgcatctctgtgattttcagcttttctctcccggccagggccaccgtatcccgcaggcgcagcgttccgctgtataaccgtagatagacacgccgctggccgcaatcggtgtactcaaccttgaaaacgctgccgcatagggcggcgcccccctgttcccccatcggttggaacagccctgtcaccgcatccatcaacggttgaatgccaaggccatttttggcgctgccatgatagactgggaacagggaggcgtcttgaacccgctgctgttcctcccgcgcaagtttttcccggctgattggttctcctgcgatatacttttccaataattcatcgttattttcgatgaccgcatcccatgcttctatgtcggtattttcctccaggactatttccggggacagcgacaccgtctgcttgatgataatatcggcggagagcttatcccgaacagactgaaccacgctctgcaaatcaacgccagcctggtcgatcttgttgataaagataacggtgggaatgttcattttccgcagggcatggaacagaatacgggtctgggcctgcacgccatctttagcggagatcaccaagatggccccatctaaaacagccaaagagcggtacacctccgccaaaaaatccatgtggccgggcgtatccacaatgttaactttacatctgtgccactggaaggaagtgactgccgcttgaatggtaatcccacgctgccgctccaaaaacatggtgtccgtcctcgttgtccctttttcgacgctccccggttctgaaatggctccgctggcatatagcaggctctccgtcaaggtcgtctttccagcgtctacatgggcaagaattccaatattgattattttcatgtgattgtcctccctttacagccccaaagggcataaaaatccccagcagtaaaatacttttaccactggggattataagttgcggacatacacatatacagcatacacctgtttgtgattgctgtttttggggatatgtcaaaattgataaggcaaaagtattcttaaattgggtacaaaaaactaagcccctacaaaaggagctatcataatcctttgttcccactatttgattatagttttatttaagaataccttgccgcatattttttactccttttctggattaaatcattgtatcacatcagttttaggaaagcaagtacctaaaagaaatttttcttccccttatatgtaacaatcataccggcttcctagcgttcagaatgttttctgctgtctgctgtggtgtttggttggaattgtccaaccaaaagccgatccgtggtgttgtctgcattttactaaatacaaattcaatgtatacagaaagatataaggagtgggagggattccgccgtagttggcattgtaggaaaatccaaaagtttagattttcccacaatgcttatcttttggtctttggttcggaatagtgtagtgctggcggtctatctcttgttttcggttgcttgcttccttaccgtacatgagcattggcgccgggattgtcattaccataaccttccagcagattgatcgcaccccaaatgccgaggccagcgcccagcgccacaacgagggtctgaagaacaccaacagcagaattaaagaaagccataaatagtacctccgaaaaatatgttttttagattttggagggtacatttctcccacgaagtttcatcgagtcgttgtcaaattagactgccgccgtcaggcgacaggttcaccggaaaggtctgcctgatacacctcaactgcatcatccggcttgagcttgaggcgatgggacagaaaacgctctatgtcaaaggcgtatttcttgtcataatccgctgtgtagcggtagaggggatgctttgtgagatcatatttgttggacagaaacgggcggacgccgcgaagctgcaagatgcacttgccgccatccagcacggcaagctcatccacgctcatcagctccttgcccaatttctgatagttcagcgaatgggaaacctcgcggccacggctctcgccggtgttatagtggagtagggaggcaccgccttgccatattactatggtaggttcgcaccaccctctccgggaaccggacttacatctctcaatgtatccggctctgttatcgttcggtcagcagttactcactggttgtggattgcaacatggcattttttgcacacaaccagcgttttacgccgttttgcaatcattgcaacctcccatgcctgcttgcccttaaggtttttgagcttgttgacatggtgaacttcgtaacaatcgctctcggtcgtaccgcatagctcacagacctttgctttcaatctctgctccaaggctgttcgggaatatccgtactccaccgcagcattgcatacgatgtccgtcggattggccttatccttgcaatcggagtattttgcaaaatagcatcgtttttgccccgttttggtttcgtaggggattccccattctccgtagtggtctttgaatttctcaaccaccttggctatggtgcatttatgcttacttgcgagggttttgaggcaactgtattccatgagataggaaaagtagcacagtttataaaaattgctggcaattccatagtagttgcagattccccgcagttccgcattgtaggcagaaacgatttccaaatctgtgagtcgcaaaagagatttacggcggacaggcatgagtttcccatccggtttctgtatcgcaatttccttggcgaaaatgaagctgtgaatcttatcatcgaatgggatagacagttcacaggaattgttgagggtgcgttttgtctttttgcctggcccaccatgcttgataatgctgcttctgcgaacacgaacatcataccccaaaaatcttgccctttcgctgctatgagtgatgagtgttttttcttcgctgagttccatctttaaggtttcacggataaactcagaaagtttactctttatccactggcagtcctcttgacttcctttcacaccgagaataaagtcatccgcatagcggatatacttgatgcacttttttgtctgagctgtacagggcattttcagcatgagcttccgcttttcgttgtattcggaaagcagttgttctctttctgccccggtgcgtctgccgatgtgataggaaagtttctggaggtcattgcttaggaggcgatattctgtcctgacaggttcttgcccatgggtatcaaattcgcttttcagcttcattacaaatttgtccagctcatgcagatagatgttagcaaggagcggagaaatgataccgccctgtggagtaccactgtaggttttgtgatatttccaatcctccaaatatccagcctttagaaatttgtaaatcagctttatcaaccgggcatccttgattttactatgaatcaagcctacaagaacgctgtggtcgatattgtcaaagcaccctttgatgtcaccctccacgaaccaacgcataccattgaactccatttttaaggatttcagtgcggtatggcagctccttttgggtctgaatccatgagaaactggcaagaaaacaggctcatacaccgcttcgagaaccatccgcagaacttcctgtaccagcttatctgtgaatgtcgggattcccagaggtcgctttttcttgggattgttcttcttctggatataggttcttctggcgggtgtgggctggtaggtttcatcagcgagcctttggatgatatttgcgattttggcttcgctgaatccatctgccgtgtcatcgtttgcacccttagttgcggcaccactgttggcatacagatttttatatgccagaaaatacaggtctggcctcagcatatagcgatgcagtctggtaaaaatttcatctttatttgcgagtgagtttctactgattcttgctaaaatttcggttgttggttgcattttgaggttttcctccctaatcaacttttcttttagtacacaataactacgccccttcgccatgtgagggtcattacccctctcggactactacgggcgttccgtgcccatgcaggattttcaggctctacagccatagccgaattttcacctccttcggttggcgttcctgtttagggcatccccagttagcgttgagcataggcaaatgtggattgtcggtctccgctttcgtttccttgccataggttctcctacagattgcacaccgtttttgataaccgattgattgacacctataaccaatcgccagtgtgccagaggttacagatactttcctccgcctgaccgataacagaaattagaaacttgcgttcagtaaacccaacttaagcctcatatccacttaacattgcagttcagtcgcaccaagttatctttaggtgacttactgctttcctgccgtgctgtgttcccgtttcagctttcgcctttcggttaggcaggttgtttcccgtgttatcttacggggtagtgccttacactactttgctcaacgccctatctgggcgcacagtatcaatggtttccttgcccagcagcttggacacatactcatgggtggattgctcgttgccgcccatatacagaaattcatcgcaatttcccacaaggctctcccactgcttttcaaaaagagccttgagctgggcgaggttctggataatgatgctcacggagatttcacggctccgcatggtggcaagcagtttgtcaaactcatcaggcagtgcgacattggcgaactcgtccatgacgaaatgcacatggacgggcagcctgccgccgtgtaccacatccgcctgatagtagagctgttggaacagttgggtgtagagtaggccgacaatgaagttaaaactggagtcattgtcggggatcacggcaaagatggccgtctttttttcacctaagctccacaattccatctcgtccgtctgcgtcatgccggccagcgattccagattgaacttctccagccgggacaccagcgtgatctggatggacttcagggtcttgccgctgccggagcggtaattgcggtaatatttcagggcgatatgctccgggtcccgcatttccaggcggtcaaagagttcatccaacggggattggtaggtgtcatcatcctcccggacctcgccagcccggatcatttccatgaccatggagaagttccgttcttcgggcggagcttcgtagtggagatagaacaccagcgccagcaagagcatctgcgctgcctgatcccagaaggggtcctgtgactgtgcgcctttgggcgtggtgttcttgaacaggttggtcacaagccgctgaatgtcgttgtcgttgcggagataggcaaaagggttgtagcagtggcttttctccatattgattaggtcaagcaccttgatgtcgtagccgtttgcttcaagcagtcccccggtgtcgcgcaagatttcacctttgcagtccagtatgataaggctggtattggcgttcataatgttgggcttggcgtagaacctggtcttgcccgcgccgctgccgcccaccaccaggacattcagattgcgccggtgtctgcggccatccagtccaatggcgacattctgtgtgaggattttgttcgcggtcagctccttatccgcatatttcctgttgatcgctctggggtcgccccacttggcgctgccgtgttcctcccgcctgcggtagttgcggtcggtggagaggtagacgccaatccccagcccatagcacaacaaaaaaatgaggacagttttcaagctgtcctcacaccatacaatgtgaaacggatggtccagcgcggccccgccgtaccgcaccagccagaccagtccgccgcccatatagggggccagcagcagggccagccagaccacaggaatgacgccgcaggcgtagagggtcaggtaggctttggagaacttatcttgcctcacggtcagccctccgtttctcccgtttcgtgggcgcgtctatgattttgagaatgagatcgtccacatcttcggtgggtttgccgtcccggatggcatcgttgcggaagtcagtcaggccccgcaccataagccgctgttcgtagtcattcagcgtgaccacacgcttctcatcacgcatagagcgccctccttatctcgcctcgtcatctcggttcttctgcgccttttcctgggcggcaaagagtcggttcatatcggcggagatactcccggccacatcccgtatgacacccgcctcagcccggagcgccctggcgtccatcccggcatagctctccggcaggcgttcaaaggaaaagccctctaccgatacgccatttcttttgcacagcatataagacacgctgtacgccgtaaaatcggggctttcacaggtaatcccatcacggtccatgtgggcgcgggcaagctcctgggccagcccccggaagatggtaggggcgtccaacccctggcggacatagacggtatgctcctggggatgataggccacattgacgccctccggcagttcgttggagatagcaaaccggcagggggcatcgttcatcagggccttcagcagcaggcgttcatcccggaccgtggtgggggcggggcgctgggcggccctggtctgggaaatgtcaaagaccttccgcacattgtaggacacgcccacgctgccatcgtcccgctggtactccttacccggttccagaatggtgatagcatccgctcctcgccggacatacacgccgttggctttccaactgtcgaagtcggccagtttggtggcctccgggcactgggccgcgatcaggatggcgttgctcacggagtagaggtcaaaccgggcctgcacatccaggtaggcttggaacagcccgccctctctgcccatatcctgcacatagctgtcgatcatggcgtagacgccctcgcgctccgcctgctttcgcgccgcccaaaccgtcttgtcaaagggcttctcctcctgctgggtgggctggccggtaaacagatcatcatagttcggcatacattacctctccttttgctttttgattttcttttttgggggtgctttgtgctggaccggcttctgccgcccagcgttctctctggctttctcctccgcccgctgcttctgctccgccttgatctccttcaatgcctgacggacagagggacgggggcgctccagcggatcagggatacccggctcggcggcctctttgggctttgaggtaggctcggacagacgggatttctcggtccggcccacggtggggttttcggtcctgccctcctctctggcagaggacgcgccccgcgccgccttcaaaaattcatccaggtcccggtccggatcgttgcgctccggaacaaccgggccatgttccggggccggggcaagcatggcgtccagaaatccatccatctcccgctcagtcatcggctcctggggagtgtccaccccggctgccggttccgccgcaggtgtttccggggcgtccatccgccgctccacccggctctgttcgatctcctgcttgacctgggccatatctacggtggcaaggccgaaccgctcaatgatgcggttgatcttgccggcgtcctccgccctcgccatgatgtcggtcagtccatccgtggcgtcccggtccttcaatacacagtagaggacgccgtacttttttgcctcccggcaaaagagctgaaggtcgctgtccttgacggcaaacaccttcagctccttgccgctgcggagcatattggtcaggcgggccttgcccgccgtctttttctgctcacgcaggatggcatagatcaaaatggcaagctgtttggccccggagccggccagcctgaccgcaacctcacctgtttccagcgacatcctcacgacttgctccgccgcgtcgcctgaataactcatcgtttgatcgctcctttcgttccaattccttttgcttcaccagccgtcccaggttctcacggacctgcccggaacgctgggcgatgccgtcacataagaccacatcctttctcactgccctgatcctgtcggacagggaactgatattctgtttcacctcgtcaatacctgcgaagtcgccctgtctgatgagccggcgcaggtcctttcggagttcctgccgctgggcagtcagggcgttcgcctccatcaacgccgtttcccggtgggtagtcaattcctcaatcgttccaatgtggtgtttccccaaaaagcgggtttccgcgtccagacggtccagcttggcgatgtcctcccgcaataaaaaagacacccgcttgacggatgccggctgcttgacgatgatgtggagttcatagcagtaatggaagtacagcgcccgcaggccggtgactttcttctggggctttccccgcacccggtaatgctggggcaggtgatggacaagctccgggaacgggggctgcttgtgaatgttgcgtagaatacgcaccctgatctcctccagcgtgtagccctcgcccagcttgtggaagcggaaatagcccctcgcgtccggtggcttcaatgcgggatatttcaggggctttccgtccttcccgtgggtcttgacctgatagcccatttcgtccagcacccgcaggaaatcgcgctcagtagtggaagcgcggatagcccggtcaatgtcggcccggatagtgccccggtgggtgggttttccatcacgctcggcccgccattcggcatagtcctttgtctgtctgccagagttctcgatcacggagatggcgtattcccggcacagacggtccgatgcctcccgcatccgggcgtagtcggcgggggagttgtagaacttttttccatcaacccaggacacggagttgatgacaaagtggttgtgatagtggccggtattgcagtgggtcgccactacaacttcaaaacgcccgccccacagctcctccgccaacctgacgccgatttcatgggctgtctccgccgtgacctcatccgctttgaaggactgatacccgtggtagcacacccggccacccggcttgccccacagccgcttcgtttccatgaactgtgcggcagcggtgtcctcccggcagttcaagcaggacacataggaccggcgctccgttttcatctcgtcggcggcatactccaccacatcctcaacggcatggagggacgccagctccggcaagccggcctcagtggtcttttccgggttccgaacgtagtcgattaccttgtccacgcgcctatgaatgggccagatggaggtcaccgccatgtcagtcggaaggcacggtataggtgtctgcgatcagcttctccacggcccggttatcctccagtgccttgcggagctggggcacatccagcagtccgagggcgttggcccgcttcatgacctgattcaggttattccccacgcgccgcacctcctggatcagcacaggtacatcggcgggcggggcctccttcacctccgtgccgttcaggacgcggcggcagtaaccctcgcgggacaggccggacttgcgggccttcttggtaagggcatccagttccgttttggtaaaacggaccttcatttcaagtgttcttttcaaaacgatcatcctttctcaatgcagggtcataggggcggcaagcccctgtcaagcggaattgtggccccacaattcgttgcttgctaagacaatgcctccatcctccgcgcctgcggcgcgtgagagcgtgcgggcttggcctctttgttatcgctcatgctctttttcggttcgcatgagggccttcgcccgctccacttcatcggacatcatatagcaccgctcaatttgccagccgttcttgccgccgtactccgatgccatgtactgttccagacggacacagggatcggagccatccagggacgaagcatagatggaatatccgcccatattaggccgaaacgccttgttgtcgctggacaccgcataggtacggctttccacggaatactccttgtcaaagctggccggagagaacacaatgaagccggacaaatgctggcgggcacgttctgctgcgcgaaaataacttcgcatggttgcataggtcatattgacttcacaaagggccttttcactcatggagtgacaacctcctattatgatttttgcggcatcataggtgatgccatacccctcgacgggcgggaaaaagcggcatcataggtgatgccgctaaaaactgttcaggaagtcaaacacggcgtttaggtcctccgtgctggcttccgcctgcgccgctggccggtcatagccgttctttgcggttcgctccaattcttcagatacggtctgacggatcagctctttcaacacattggtttgctcttttgcgttgatcctggcgatgatctcctgattgatggatcgggcctccatgcggtgcagggcttcccacgccctgcggtcattctcccggtcaaggttaaatcggagcgaaaaccgtttggtattcattctctcgtccccctgtgcaaagcctgctcacacaggaactcatagcccttggcggtggcgcagatgtcctcgtagatcgttacgcggtcggcgtcataagccccgaagttgcggaccagacagcttccgccgcccagcacatggagccgcataagagcggggttgtactcatgctcccgcaggatgcggaaaatctcgcccacatactctgcggcggtttcccggatggtggtcaggtagtcctcccgaatatccgctgtgccgaaccgcagcacccggttgatgatcgactcgtccaccgtggcatggtgggtccgcatgacattctcccggacggccagcatacattgatgggtgccatacttctcagtaaacatccggtccacaacaggcttgcggtcgttgatgaacatgatgttcatggtgccgttgccaatgtcacagagcatattcacgccctggaagtccctgatctggccggcaaccgcagcgaagccctgggggaacacatccaccccggcgatctccacccggtaggcttttccccggaaggtaaaggccagttcccggttccgcatgaggtaggctttgaagtccgcccgctgccgactcacccaggtgaggggcaatcccactgcaagatataccgtggcgtctgtcaggccatatacattcagctcacgggcgatagcggccagggtgaggatatagtagtcatcgtccccggtcttgtccgccttaaactccttgtggcctgtcccaatcaggtagtagcgtccgtcatagaccagcagatcgtctttgaataccggctctgcgtcatggacggtcagccccgcgggaaaacagcagtttgcagtcttgatgttgccgtagccattgtctatcccgatgatcttcatgccctgatggtctttcaccggctccattcctccttcctctttgcctgccccaacctccgctggagcagcagatcgtttacatccttgccgctgggcggcggcctgtccagcacttcgtatctgtcccccaggccagccatgatacccgctgccgcgtcccggcccacctcgtcattgtccaggtggaggcagagcgtgtggacgccggggtggtcctgaaggtactggctgagagccatggggatgacaaactcttgtttctgcttgaacaccccgcccagggagagcatggcgtcctgccgccagtcccggcccttcattttcagcagggtggcgtagctcaacaggtcgatggccgattcaaacaggtggacgctgggtacagcggagtcctccgcgatggcgaaggaataccgcttgtcactgccggtggcctcgcccttgaagtcccctatgatgccccgcagggcggcgtagcggggttggccctgccggtcccggcccacgaatacagcattgtgatagggcagactttcatacaaacgcccggtctggatgcagtagtcgatcacatcataatcaatgccccgcccatgaagatagctgacaacatgggttgcacaccggctggattggggaaggaccagcttccggggttcctgctcctttggcctggcttgaggcgccggagacgggggagagaagttcggccccgtcagggcctccactgcctcggtaaaggaaaagccctggaccttgataagatagtccagggccgttttcccgccgattttgcgggagaaccagttccattttccgttgctgatcttcaagctgtcatgctcacgggtgcagtaggtgcttccgcctacatggacgagctggtgcgggtcataccgctggagataggtcagcaggtcccattccttagcctgagcgatctgctccggggtgacatagcccatcctaccgttcctcccgctggcccttttccttttcagctcgtatgacggtatctgcgcgggcctcgatcacatcccgtacatcgtccatgtggtgggtttccgcccgctcccacgcccggtaaacatccgccagcggggtccgggaccgcagcagagccgcggcctgggcgtccgtcagttccagtacctccaactccatcacaatatcctctcggaccgtgaatttgcaggcattgtccaggatcacattggggggctgctccagaagccatgccttatacttctgctgctcggctgccatccgttcataaagttggcgcatcatttctttgttggtcatgctgtatcactccttataaaatagtgatagccgggagatctccagatgaaaacctcccggctatgtaaaacggcaaggccgcagacacggccttgccaaaaaggtatgtgattgctttatcgggcgttccggtctttcccggctttgtgtttcgctggcagaggtccatctttcgcctgctctaatttttccagagcaaaatccagtatcttcaccttccgctccgccagcatggtcagataaaattgccgctgcaaatcactgaggaatggggtgtcataaatcaacttcccgattttacccatatcaatccgggggacgatcctccgcagggcgcggctgcacccctcttcccgcagtgaggaaataaaatcgaaataccgaattttctttccttccagcgtaatcgcggaggtcggtatctcataaattcgatagtcacggtcgccctgattggtaaggacagaccgcatgatctcgtcatccgcctggggatagaggcaactcccacaatcgtagaccggggccagttctatggcgtcgctgacggcatcgtagaggaagccccagttcccgttgtgccggtcccagttcccaatcagggcgtctacgatgaacatatcccaaaagcggtccagcagttgagcggcgtctatggccgtttgtgccgtaatcgtatggaggatgtcggacagttcggtgccatacccgttgcgctctgagtcgatgatctggtttttcagggaggcaaagtcctgaagcacgagcccaggccgggtaaagtcgccgcaggcaacaacgatcttctctgtgccattcaccgtgaatgtgcccagcagggtcttttgtacggggatgccggcaatctcgaatatctggcagccgaggtattcagaaaaacaactgttgctgtaactcatgtccgggtttttcttcgccatagagggaaattttagcatatattgctccccgtcatagaggacggagatcttcttgccgttcgcgccggcgtatgccttgttcctttttggcatacctgtaaagtcaataacgcccatgtggtcactccctttccatccgcagatacttctcccggagataccacgcctgttctgaactgatgacctgattgacctccgcgttgttgatgtctgtctgcaagttgcagtagtcgcagtcccagcgcaggtccttctcaccccgatccagccggtcccaggccgcctgcatctgggctatggattccatcaaaaaatcaggcaggccgcactccagataactcttatctgttggcagtccggtatcgctctcataggccggggataattccatgatgtcctccatggtgcagtccagcgccttggcaagttgctggacagtcttggcggcacaccgtccgatctcgctccttccggcgcagatgtcaacgatggtagtattggggacgccgctgatttgcgccagacggtatttacttatgccccgctgattcagatacccttgcaggtccataccctgtgccttcctttcaatattttcctccattatatcggcataccgattgtctgtcaatcacttatgctccctatgcccaggaaaatagaattacgatgattataaacgaataaacatcgtgtcaaagtcctcgaacatgaattgtattttgtcgatctgtttccgggtatggtagtggccgcagtaccattttttgtagtccaggcggtcctctatgccatccagccagtcctcggtactcttgtctacggagctttggtcaaggccggagagaaatacttcggtcggctcatatttgcgggggcaggtgtggctcaaaacaatgtcgatgttccagtgtaaggcggcaagccgcgcttcaaccacggctttgatctcctcgtccggctgctcatccggccaccaatgccacccgtgcgccagccggtagtgcttatccacactgtacgcgcccccgatcacgatacacttgtacccatcgaaattgtaaatctcgccgtcaacagcaaagaggatgttcggaaatgcttcttcatagagaattttcccgccgcagtattctccttccatataggatgggatgcgctggggcctggcttcatggttgccgtggatactgaagaatttgaccggaatggcgctggcatactcttttgcgcgggtgtcgcggtcattcaggtaataattgaaacccgcatcaccaaggatgattatggtatcggattttgttgtttccattgcgcggcaaaaggtgtccacgcggagaaagttcccatgtgtgtcacctgtgagataggttgccatagcattcaactccattctatcatgaattttgataccgtatacaggtgggcgtgggacacccatccgcggaaatgatacaacaaactatgtacgggggcaagtctgcggcttgctcccgtatcatgtttttgagggtcagacatttctcactctttcagcgttcgcggtcgggactgccacgggcgggggcggtgacttcatcccctacatctccatccacgatctcgctctcccgcttgtccatgttcagcaggatgttcaattcatccaggcgggcggactttcttttcagctcgtcctcctggggaaagggcttatccacctccagtttggcgttttcgagctgcatcctggtattttccaactgttcccggcaggtgctgatccgctcctccatgctttccagcagattgtccaggcggagaatgttgccaaaaacatctgtgccgaggttcgtggtgtagtacagcgcccctttcagcgtgaccttgaactccctggtcaggcttgcaaaggacaggtccatagaaaagccccggtactggcccagggggacaggttcggggctggtcatggctttgcaggcggcgaggatggcgctgcctgcggcttttttgtcggtgtagacggtcccctccacctccatgggggagaagccgtcctcattggggtgggtgttctccttcagccggtccatatcggaaagatagccctcaatagactgctcatacttggcaatctgctgaggcagcgtcttaatgatctgatcctccagagcgtaccgctggctgaggtggttggctttcaggagccggagacgctgcacatcaatgtccaggtccatcttctccttgatgtggggattgccggtgcagagcgccttgatttccgcgtatgacagggcggtttcatctatatcctcgcaggaccggaccggggatttgctggtcatgatctgcccgatgaacttctgcttgccctccaccagctgatagaggtagctgtcaaaggtgttctcggtaacataggtatagatgtccacctcgttgttctcgttgccctgccggatgatccggccctcccgttgctgaaggtcggaggggcgccagggacagtccagatggtgcagcgccacgagtttcttctggacattggtgcccgcgcccatcttctgggtggagccgatcagcacccggacctgcccggagcgcaccttgccgaacaactcctttttctgtgtctccgtgttggcgctgtggatataggctatttcttcggctggtatgcccctggcaatcagcttattccgcaggtcatcatagacattctgaaattccgccatctcgtagccgccctgctcgtttgggaccatttcaatgggccggttcttgccaggggtggagaggtcgcagaataccatctgcgcggaacgctggtccgctgtgcgctgccatatatcaaacacatccccagcacaggcgttgattttgctggtgtcgctgtccgggagcaaggggttgaggagccgctggtccagggccagcttgcgcccgtcgttggtgataagcagcatattgtcctcggtactgtccaccatcctgttgcggaccttctccgcccgctgccccagcgccgccaccatctccttctgctgttccgagggttttagcacgatgttgtggtagttggccttggggacggggaggttgagcatatccgccgtctggatgtccgccacttctttgaacatagacatgagttctgggaggttgtagaaccgggagaaccgggtcttggcccgatagccggtgccctccggggccagctcgatggcggtgacagtctcgccaaaggtagacgcccaggcgtcaaaattgagcaggccgtgttcttccagggtgtggtactgcaaatacttctgcatggtatacatctccaccatggtgttggagatgggggtgcctgtggcgaacacaacgccccggcccccggtcagctcgtccagatagcggcatttcatatagaggtcgctggacttctgggcctccgtctggctgatgccgcccacattccgcattttggaaaaggcggcgaggtttttgtagtagtgggcttcatcgacaaagaggcggtcaatgcccagttcttcaaatgtgaccacatcatccttacggctctggtcgttcaactttgctaacttggcgtcaatggacttttttgtgcgctccatctgcttgatggagaagcgttccccgtggttggctttcagttccgcgatgccgttcaggacctcactccgctgctgttccagaagataccgctggcgctccacactcaccgggattttctcaaactggctgtgtccgatgatgatggcgtcatagtcgccggtggcgatcctgccgcagaaccgcttgcggttcttggtttcaaagtccttcctggtcgccaccagaatattggcagaggggtagagctgcaaatactccgacgcccactgctccgtcaggtggttgggcaccacgaacaggcttttttggcacagccccagccgcttgctctcctgggcggcagctaccatttcaaatgttttccctgctcccaccacatgggccagcagggtgttccctccgtagaggatgtgagcgatggcgttcacctgatggggccgcagggtgatctctgggttgatgcccacaaagttcaggtggctcccgtcatactcacggggccgtatgctgttgaacttgtcgttgtagagccttgtcagacgctccctccgggctgggtctttccaaatccagtcctgaaacgcctgcttgataagctgctgcttgccctgggcgatagccgtttccttcttgttcaggacaggaacacggttgccgtgttcgtcctccacatagtcaaaaatacgcaaatcccggaggttcagggtttcctctatgatcttgtagccattgacacgggtggtgccgtaggtgttctccgccttgacattgcccctgtcggcaaatttactttcgatattccatgcgccggtgtgctgggagtaatggctgcgtatcatccgctgactgcggggggaagtcccgaacagttcatagataaattggtcaatgacctctgtgggcagccaggtggcccccagccggacggcgatctcgctggcggtcaggtccaccggctgcacccgttccaaagcctggacatgggcggtgtagtcctccgggtacagttcggcgcttcgttttgcccattccagcttctcccgcacattcccggagaggtattcgtccgcggtgaggtacttttcctcggagccaccgccatactcgtgcatggggttcaggaagatcacgccggtcaggtcggcgtagacctcctgctcggtcttgccggtcagctccgccatatagtccatgtccacctttgccttttcagccagtgacacggccagggcctcggacgcggtatctacatgggtgatcgtgaccctctgcttgatggtgcgcttggtaaacatatccgccttgcggacaaagttgcgctcatcgtccagcacctccagcgaagtcaggaggaagtaggcgctgtccatgctgaacacggagctgttggcgcgggagttgatccgcccgtacttgtccacaaaggcgtcgtaaagagcgttcaacttccgctgctgggcctgaatgtcctggtcgggccagtcctcggtctggtactcaatgagcgtccgcacacagtcccgtatgccgatcagccccttgatgcggttggccgctgtcacggacacctctaccgggttcatgcggctgttttcccggtagtacaccttgccgtccacgatggtatagctgaaattccgtacctccgggtccgcggggatggacttgtcctcgccctcgatttccgggtcgtccatgacatactcggtgatggagccttggatattctgaatggcggcggcaagctgttctcccaggtcccgcccctcgatgggcaggcaggcggtttccggcccataggggccgctgatctcccgcatttcgcccatgaccatctccgggtggtcaataaaatactggttcattttcagcccgttggcgtcggtgttcaggtgtacccaatccggttcctcgctggagagggcgtcccgcttctgcaaaaagaggatgtcgctggtcacatccgttcccgcggcgtccttgaaagtgttgttgggcaggcggatggccccagcaggtcggcgcgctgggcaaggtacttccgcacagtgggggtgtccttgtccatcgtgcccttgctggtgacaaaggcgatgacaccgcccggcctgaccttatccagcgtccgggcaaagaagtagtcgtgaatgaggaaattgtatcggtcataccgcttgtcgatcaccttgaaggagccgaagggcacattcccgatagcggcgtcaaaaaagctgtccgggaggtctgttttttcaaacccctggacagcgatagacgattgttgatagagttgctgggcgatgcggcctgagatgccgtccaactccacgccgtagattttagagtccgccagggcctccgggcgcataccgatgaagttgccgatgccgcaggacggctccagcagatttccggtctggaagcccatgttcgtgagggcctgatagatggagcggatgaccacgggcggagtatagaaggccgtcagggtggactccctggctgcggcatattcctcctcggtgagcagggctttcagctcggcgtacttgctgtggcgctcgtcaaagcagtctgccaaaccgccccagcccacataccgcgccaatacctcctgttcctccggggtggcaagccggtcctcggcctccagccttttcagcaggcggatcgcccggacattgttgttgaaccgctccccaggggttcccacgcccagggcgtcatcggtgatgtggtactcatgccggtctgcgttgggaacttcaggatggaggacaaagggggaaaccctggccctgcgctggggggccagtggcggctccgtaccgccttggtcgtgcccatctgctgaactttccacgccctttcccggtcccgctgtcttttcagccggtcccatcagacgccgaatgacggaaatatgctccacgcgctcgatggggaaaccaactgcgccctcaaaggtgagatcccgcagggaggcccggccatcctcgtcgatcttttctacacgaaaccgccggccctccagcgtgatctccttaccgagcaggtcacggtccgaagcagccgtttccgtatcctcccgcgggggcagaggttgttcctcttttgcggtgggaggttccggtgtggggaagtccccgatcacgcggagccacttcttctccagcaggtcgtagacagccgcgccctcgtaggcaaagccgtctggttccatcgtgccttccagatagccccgtgccgcctgttccgcttcctccggcgtcgcgtattccagcttctcgtccatgccgttttccaggtggtgatagaccaccacctgataccggcgctccgcttcgtcccggtccgccggggcatgggcgggcggcttctcccgtgcctggaccttttgggccagagggcggtccgcataaagttgtttctccgcctcctccagtttggcaaagctcccggtcgtgggcgtcaccctgccggaaatgaagccgtactgattgcagaaggtcccgttcggttcccggaagatcacaagatgctcatcgccggaccaatattccgcggcctgccggtacgcgaggtcttgggcggcgatggggtctttttttgcttggggccgatgggtataaagtgctgcttcggcctgctcaaaggtatcaaagccactcgccgttgcatacaccgtgttatcctgatcgtcatagcagtattggacataatactggccgttggggtactgccggatcaggatggtttcgccctccccataataccgggcgcagagctccacctggttcaactgacgggcgtattcctccgcctgccaccggctggtaaattcctcgctgacgccctcatcgtccacatagatacggtcgttctggccatcccacacgccataggcgatttgggagccgcggtccagctccacagcatagaagcggacatccggctccgcgccggccttctcctcttgactgggcgctgtgtccgcggggtgttcccgtccctggcgctgtttgttgtactcctcctccgcaaaggccaccatctcgtcaaaatccaggttggcgagaagttcattcaggtcatggaagccggcgcattggatggaagcagcctctgagccgtccaccagataggacaggcggaacgataccaagtccacactgatctctacggtgtgggcgctgtcgctggtggagctgaacgccagggggacatgagagaggtcggagaagtcggcctcctgctcaaagacctccatacagtaagcgttaatgagccattttgcccgccccaactgcgcctgcgccatgtcaatgacctggaagccctggggcggcgggtccagttcggcaaggaagtcctggggaatggtctggccctggccgtcccggtagaggacgatccgcatgggcgcgccagcatggttttcttccttgattgccgccacaaattcctccgcgccggtgtactccacgctttcgcccacgctgccgttcgtgcccaggaagtcgatccgtcccacgggcagcggggcgtccggcgattccccggcatccggttcttcggcgtcagccacgggtgccgcgttctccgccacctgaagcagtctgtcgttcagcgggttctccgccagcagacggtcgaattcctcacggggcagttccttattgaaaataggaaaggtcgggtcatagagccggacggtctgctcattataggccagcagctcatactcctgcgcccccaggtacaccgtgtcgcccagggtcaagcggtattccttttttggagggggcggcggattcagttcctcctcggtgggttccagcggtgtggcaaggggaccgctcagatcagccagcacagcctcacagcgttccgtcaggtgggtcttgtcccggatgatcgtctgcatggcgtttcgcagggtgggtaggacaaagagattatctcctgacagaacatagcacttcttttcccctattctaaaggagttcgcacacgttctggcaagtaggagttccttgtatgggtccgtttcaccggtccgtgttttgaaatccacataatcatcaatgatggagcaaatctccgctgcgatgtcccaacgggccttccgctgctctacctgtgcccggtatttcggataatgctctttttcagcccggttcaggtagcgtccagcggcaatcagttccccaatacgcttttccaccttggcccaggtcagcaggaatttcccgtcagggtcgccgtagtcgcgggagatggtgatgcccgtgctgtcgtggtctaccctaaagccgctgctggggatagcgttggaataggagcctacgccgtattccgctttcaggaatttggcattttcctgtctgctttcctgcttctgatactggtcatagatgcggagtttggacggtgagtaccttccgcacagaacatagtcaatggcctcctggggcaaaataaaagccgaagccttttctgcttctgcctgttctatgagagagacttgtttcgcttcgctgggcagggggcgctcatccgggtcgagccactggtgcagcaggatcatcccgtagatggtgtcggcaacatggggccaccgaaggaattcctctttctcgcgggagaagtacgccccgcgccagaggttcagcacatcgtcccatgcccgatacccggcccgctggccattgctcaaaattttctccacataggtgttgtcaaagaaacccttaatgaaatcgccgcgctcttttctgccctcatgggcttcaaagaacgcggcgatctcggtcctatggtcttttagggcgtcgctgatgcggagtaattcctgtttctcgctgtcctcatgatagtaagggatgtccgtgcgggcgtcaaaatcatggtggctgttttgaagtccggcagtagcggatgtcccgtcaacaggggcctgtggaagttcttccccagcaataagcgggccgcttatgtgtccgcgtagaccagctctgtcagcgccacttcctccgctgctgcccggatgttgttcatcaggcccacccacttcatctgatcgctggccttcagctcctccgtcacgccctgctcccgcgccatccgcgccatcaactgctccaccatctccgtggcctgccggtcgatcttctccagatgggcgttcagcctgccgctgaggagcatccccgtgtagtaggcgttcctgtgggtctgaaggtaactgcgccgcagcatcccatattttccgaccttcggggcctccggcgcttccagattgggcaggcggtagtcgccctccgtccggtatgtcagttccatgttcaatgctcctttcctgttttgtcctgctatcatgatacggcctgtttggagtttgcgcaaatgtgcgattttccctttgctctgcccggtacaggctcaaaaccgtgctggcgatctcccgcaggggcatttccgcaatatcgctcaccgcgccgcccaggatggagagggtttccggggtgtcaaagtcatagacatgggcgaaatcctcgccgctgaaatagtccatggggtcgatgccgcaccgggtcagcatgataaaggccacgctgttctccaccagacccttaaaccatgtttcagtgctgagatcgtccagttcttccagcaggctgcccgccttgacaccccgcagttccgtgtagtagtcgccaaggttatcttccacgatgacctttgccgtttccagcaggcaggcggcaaggccggagcggtccgggaactcgccatagctgttctccagtgcctcgattaccgcgttctcataccgcggctccatcttccagatggggatcatgcgcccctggcggctgttggtatcggacatatcaaagacataccgcagcttgtagccctggtccgtgtccaccagcagggcgatccccctggtgccccggttaacatagcggccatgcttgttccagaagtcgatctgggcgcaggcggtggcgtccggcttctgtgcgtaaatcaaaagctggtcgcggaaattgtacttgaagttgtgggcggcggtggtcaggaacgccatatagttcccgctgttggcggaaatttcgcgggtcttttgcgccgcaagttctacaatggagtccagttttttcgccacactctatccctccgtttcttcataagattgtagcaggccctttgctgctgcggcgattttagagatgcgcccggtgagctgggcaacggtggcccgaacctctgatcgccgcgccgcgtagaagtagcctgcatcggcgctgcaaatggggtggccgtcacagcgcaggcggttgaccgcccgccgcagctccgtcccgccgacatgaaacgcggcctccagctccttgctggaagctgcgttctcctgtcccttgtggtgtttcttcaggtacgcgcacagggactcgtcaatgggtacgcccttcattggggatcactcctgcttcccaccttcaactttttgtgatattcctcgctcacatcatagttgagggctgcggataaaaggagctgccagatcatttcttccgcttcattttcatacatacacagactggcgtattgttcgccgtctttactcatatagagccgggtaaagcgcatacgtttctccatcaagtccttcgcaccgcttcggacgctctccacgggggcgttagcggcgttgtatgccaggacagtcatcaacaggtcaaacatagaggggtgtagttctaatttggtgttgggtatttgtgccatcatcgtcctacctttccacggaaacggcctgccggggcttgggaaaatcccagccgtacaccttgccgatctcgtctcccagcctgcgggtaatccgggttatatcggatcggacagcctttccgtaatacagtttttctttcagcaagtcaatttgtgagtcccgtgctccgggcttataggtgcggtaaagaagatggttcgtaccgtcgtggtgtatggcgtcgcagcgcaggtcgcccagcttatccacataccatgtggcgtattcaatatcccggccactgtaaaggcagtcccggatattgccgctggagatttcctgatagcctgtacgccgcccattccaaagtcccaggtcagcgatcacaaggatgggctggtcaagctggatgttcagattgacgcgctcatcgtccagatagcggttattgatctcgtacatcagggccatgcgctcgtcctcggtcagctccggatgatcttcctccagatcgtccctccagtcctcatagtccagatcgtagttgctccatattaagtgcctttgctctgtcatcgtgaaccgcccctttcgtggcggcggggcttgacaggccgtcctcgctcgttgtagcggttcgggtcagcggcaggggaagtccagccctgggtcaccccggccagcatcgccgccgcctgcgccctggtcacgcccatatcgccgttgagcacatccgccgtctgctggggcgttttccctttgaaatgggccataggggacacctgatacccaggcttataccgctctatgacgatcagctcgccggatgatggcaaaatggcaaagcacttctccggcaggggtggtgtcagtggcaggacggtgttgtggcagcgttccatctgctcggcaaactggcagatgtgaaacaggctgtcccagccgttgcctacctccacatggcagtcatcaatatagcggcaggtccggtcgatgggcgcacagccctcccggagaatacggatttgcccgccgtccgggatgcggaacagttccttgtagtgcgggtcgatgaaccggatgcccttttcagcctgttccatgtgccggtccagccagtcgcggcggtagcagtagagaaacagattttcctcccccttgtaggggtgcagccggatcagataggcatactgtgctgtgtccgcccggaagccgaacgcaaagccgctatcgtagccgctctcctggtgtccccggcagaaatcccgcatggcgtcacggcttttcagaaacccgccgtactgctcgtcccccaccagggcctccaggacctcctcaaactcctgctgaaagtcctcggtgtccagattttcccggtggctggtccacttgggaaagaagcccttgccatcctcacccatatccgctcgaaggtgcccgatactcccagtctggccctcaatctgtgtgctttgtctggcaatataaagccgctccgctggagcagcggcgtgaaaagttaattccatacgatcacgctccttgtcaacaagaaggcggccattagcttcccactgatagccgctttctctctatacgatattgatagaccttctaccgggcgtcgccccggtcgtggcgcttgggcttgatgggctggccctgctcatcatattttttcgggtcggcggctggcacctgccagccgaacagggagccggccagcatcgccgccgtctgtgctttggtcacgccgccgcgctcgttacactcacttacgatctccagagcctccgcccggtcatggccgtacttgtctgtacggtaatagccgctctcgccctttttgacaataatgatttcatcactgctgggcagcacagcataacacttgtccggcagggtggaacgcatgggaatcaccatgccgcctgtttgctccagccgctccgcaaactcccggatagaataaacggtgctgccccactcgtgggacagttccatgtggccggcgtcgatatagcgggcggtgcggtcacgggtgccatctccgcctgtgataatgcggatctgctccccatccgacaccctgaatttctctttgccgtccgtggtgacaaagcggatgcctttttcggcttccttcatgtgccgctccagcaggtcccggcggtaagcatagatatatgcgttatccagcagctcggatggcgtacaacggagtagataagcatggtagccggcatcaacgcggaacagatattcggggctttgtatgatgcggctttcctggttgttcaggcagtaggcaatcatcgcggggatattcttcagcacagggccatatcgctggtctgatcggagcatttcaatcatggcatcgagttccaccgagaactccggtgttttccatgcggggtcccaaatgtcccaatggctgtaaaacgccgtgccgctatcgtccaattcagcaactaagatacccggacttccgcaccgctccatgatcggaatacactgccgcttggcgtatagtcgttccgttggtgtcgcaggccgcaaagtcagctccactatcgctcacgctcctttaccttcggctgctgtgcaggctgtgtcagtccggcctcatgcgcccgccagtagtcgggatggcatactcggatggtatcatcaatacatttgctgtattctccggggccaaagtattcattgaccggcgcggtgtaaagcccccggtccatcaactcccgaaggacgatctgcgcgtcgctgtcctcctcaaagcacagatagccgccttcccagaacccgtaccgctgggcggtgggtgataaattcccggccacaaattcccgcgccaccatgatcccgccgtggctggctgtggaaacatcgaagaaaccagggcagagggtcttgcgggtctggataagcccccagggagaataggctggctcatagctcattcccgctcacgctccttccccgatttctccggctgttcgccggagcgttcctgctttgtcatctggtactccagttccgccccggcccgttccagaaggtcctttttagcggccaggagatcggagtgataatggccccagtagtagtaatcacttccctgacaggcccatgtcacaaacatggaccgttccgctatgctcacacccagcacgaactcggtggtcccgatgtggatggagtcggtgataagatagccggcgttcatacggctgcccatatcagcggccctccctgtcacgagagtttcgttccttttcagcctgtcgcagctccaggtaatgctttgcccatttgggcaggtcctccggggcgatgacgccgagaatgtcgctgcgctcaaaccgcgccctctgcccggaatacagctctgtgcagtaacaggcagtgccgcggctgttggggtatgcgccggagccgctggtacacaactggagctggcaggtggcgtggcggtattcccggcgcagcacctccgggcggatcaccacgactttgccccggatgtcctcctggtaactgacctgttcacagtcctcggcggtgatggctgaattggggatgccctgaattttcgggccgttcaaggtgatatgggtcttttccgcctgttccgccacacgctccccaaacagctttaccagttccgggtagtcatcgctgaccatgacctcggtatagtttgcgaatatctcatgctgctggcagaacgcgcatacataccgctcatcctccggcgctgacgggttttcccccagcacgatctcccggtcgccaatgtgaagcgcatggatgatctcatagtccccggccatacgcttttcctgatctatgtccatttgaagtcctcctcgtataataagtttcaaagttaatagtttcaggtatcagcaggctttgaggtgcccgtgatacaatagctgtaggacagcagggtcaagttctgagtcctccggttgagccgtaaggctacttcactgaaagtctgttcccctgaaccggaagttagctgcaaactcattggctgtttgcctgggacaagaccgccctttcagcagtgagggctatcgcattggtctgcccaggaatgattctgataagcgagggtgccagatgctccggttatcatgggtatctcaaagcctgctggcctgaaatctccatgcggggaggtgaaaattgtgaatccactattcgttggcattgatgtgagcagcaagaacaatgtggcctacctgatgaaaccggacggcagcaaacactccagcttctccgtgcagaataaccttggcggtgctaaactgttatcagagagaatcgtatcggcacttggctccatgcagcttgagcgtgtggtgattggcctggaggccacctccatctacggggacagcctagtctatgctcttcgtgaggatggccgcttggggcggtttcagaggaaaatccatgttctaaatccaaagcaggtgcggaaattcaaggaagcctattctgacctgccaaagaacgactgggtggacgcctttgtgattgccgaccatctccgtttcggcagaatcaacagggaggtctacatggacgattaccgctacaaagccctgcaaacccttaccagagccagatttgatgtcatccaaaacttgacccgggagaagcagcggttcgccaactacttattcctcaaatgctccggcatggcccaggacaaagacattcagaacaccagcgccaccaccatcgcactcatggaacactttgaaaccgtggatgacttggcgaatgccgacctggaggaactgactgcctttattactgaaacaggccgtggcaaatttgctgacccggatgctaccgccaaggcagttcgggctgcagccaaaggctcctatcggctgcccaaaacagtaaacgacactgtaaaccaagcaatggctgtttctattgcctccatgcgcgccttgaaagggcaggtcaaagtattagataaggccattgaacagcagtttgaaatcattccgaacactttgacctccatccccggtattggcaaggtctactccgccggtatcattgctgagattggtgatatccaccgttttgattcccaagcctcggttgccaaatacgccggccttgtctggaacaggagccagtctggcgacttcgaggccgaacactccagaatgattaaatccggcaaccgctatctccgctactacctgctggaagccgccaactccgtgagaagatgcgactccgagttccggcgttactatgacctcaaattcaaagaggtcaacaagtaccagcataaacgcgcactcgctttaactgccagaaaactggtccggttggtctttcggctgctaaaggacaaccgcctgtatatcccgccggagggctgagagcgcagcttgccactctgactcataggccctgtttcaaaatttctcagggacagggctttggttggtgttgcctttttgctgtctacacagtgctttttactctgtttcgcttaaaattttcttgcatcacctacttgacttcataccattggactcgtatgaacagcgtcatttcgttagcacattgtgagtaaaagaaagtggctgaatgaggataagatatctggcaaaatcaacatagagattttataactccgttcacaaacaggaaaaattcctatcataacttgaaagtcagtccgagaatgaaatgctgccagcatactttttgagtacccttagaatatcttatccgtaatatcctctatatggccctccagttgaactggggggttcgcttttcagtaactcttgatagtacgtcggccttgcaatagaggtaaatccgctcttgccggtaatgactacattgttgtagccgctggcgcagtggatgatgagcacattgccgtttccgtcaaatccacagacaatgccgacatggctgtctcccggatagaacacaaggtctcccggctgggcatcgctccaagcgatggcagtgcagtattcgtgctgcatggttgctccaccaccatgaccgataacataactgccgccagactggttgtaaaacacccaatcgacaaagccggaacagtctaacccgaatgaacgcaccgttccggtcgtagaactgcctgctgctgtgacctccataggcgtcccccagcgggagtcccagccgatgacgagggactttatagcgataggtaatccaccgcttttatcccggtgttaccgggacagtcagggtggattttcccccgcttcacaccgtgcttgcgactttcaccgcacacggcgcaccatcagtgcagattatttgttgcgtgtatgtgaagtaaccagtttattcctaaaacctttgattttcttttgcgcttcgctgtcgaactcaccgatatcctgattagggtcgttcacagcttcaaggcattttctgtgcatagagaccagattgttgacacggttcacttgattcagcgggaaataggggttgactctgtgagcgcaaggcgcagttgatattaaccaaccaccgcagacccggcatttaagcctgtcacggttaagcgcataggccctgttcataatgaactcgaaattgttgagttgcccccatttgctgtaacagacagcgcgggatgtactctctgagtacatctcatccagccgcgtattcatgcgtttcttttttgtgcgtttgaaataacgctgtctgccatcttccgaatatggcgtttctgcctgtgtcttcacgggcgtcatttcccactggcaaaaggagagggcggtaaagccaacatagatatcgcgatattttatcgaggggattttctgctggtgcttttgatgaacatgggataggttttgcgtttgatttgctggtatccatctgccaccgtattgctttatgcgcgccttggaaattatttgcaatcggtgggagtgtcgccgcaaggcgacgctgacccatgtacagcactggtagtattggataatccctcgaacttggctgttgatgcgattgatttccccgatgaattgttccttgctaaaatttctgggaattttcttgatatcctctgcgatactgtcaactttccgctgtaaccgttctttgtctggtattgtctttgtaatatagcctgttctgctgtttcccggtatcattttgagttcatagccgagaaagtggatgtgttttctccgcacatctgttatcagcgttttttctgtggataatgtcagcttgagtttgtcttgcagaaatgtttgcaatctggatttccattgttcggcatgggcgcgggtgtctgtgatgatgacaaaatcgtctgcgtaccgtatgagccatcccggattcagagaggtttgataaagtgaccttcgcttggttcccgcagtccggtaagttcgtcgagttttcttatgttcccactgctttgtgacccactcatccattatgtccagataggcattggccagcagcggactgataattccgccctgtggggttccgtactcgtttacggtgcattcatccatgatcccggctctcagcatagccttgatgatttgcaacacacgcctatctctgataccgatgtggtacaggcggtttagaagaattccgtggtcaatgttatcaaagcatttgcttatgtctccctcaacaatccagtatttagcagatgtgtgcgctacctgattgatgcgcgccagcgccatcgcggtatcacgcatgggccgaaacccgtaagaatgctcaaagaattgtgcttccaaaatcggttccagcacaattttcatacactcctgtacgatgcggtctcgaatagtaggtatgcccagcggacgtttctcggcttttcctggtttgtcgatatatttccggcgtatcttctgaacttcaaagtgcttaaatgcgttttgaatatcctgaattacccactgatagggtctctccagatagtcctttcgcatggttttgaaatctacaccgggagtctcactgccgtgattgcttttgatgttgtgaattgctgtgataacggttgcttctgctgacatgatttccagaagtcccttgaacgctggcctcccgcctgcgtcgtagacctctttgctgtgctgatacagcttgtcttggagttcgcgtaattgtgtttcggtttttggactgtcgaattgttgtgccatacgcaccgcctccctccggacttggtgtttctggttttagtcaggtatgcctacggcttcctcgactttctgttcacatacaatctgcattgactatgccccttcgctccacccccattacaggggcttcatcactactacgggctcctgccccgtggataagcaggtcatttcctacctgcgcgggcgagagtgtcatcccttttacatttccatgtgcccgtccacggttcctttgttccctatgctttagctttacatgttggttttagtccatccctctggcccgactgccatctttggctggtgtgaacttctgccaaagacattcgacctcaatggttttctgctgttctctgcgggtggaagcgtcgaacagcggcagcaccccattccggggctgatggctgtattatcatcctcttctttacgagccttactctcaggacttttgtcggttgcaacaagacatactggacatgaccgatttatagcctcctgcgggtgcatccatctcaaaccgcactaccgctctttaccgggcttcgcacacatcacatgacactgtgatatgcgtgccggagtctcagagtttttgttacccgtcacaccgggtcaggcaggtactccccctgccaaatcaagcatagagttcagatttcttatgaaatctgccttgttttattgcgtatttctacgcagattgtcaaggaacaaagcgcacccgccccagaaataatggactttacccaagagttgatacgccgtcagcacaacttgcctacgttccgcactaaggtcggcgggaagattctccataattttcgccacattctccgggctgagttcgatattctgataacttcccgtcaaagccatgaacagttcctgatatttcggatgcatgagttcctctaacaatctgcgctgttccgtgttgaattggtactcatccgccatttgcaggtgcgtttttattgtgacggtgatatgcaaaatgaccgtatccgcttcatctttgccgcctggtactatttccgtccaataagtaatggtgttcatgtcccagaagatttcacgaaggatctccattttttcttcggtcagcgtagcgacctcatccggcgaagcgttgtccgtggtggtccgcacagcataaacggccagcacatcccgccagttggagatcatggcggcgctgccggcgttgtccatatccagttcgtcatgcgggttctctgtcttgatctgttcgatccgggcggcgaactcgccgttcaatacgctgacagcttccggcatggtgtagccggtaccgctgtcctctccggagaaaaagatcccaaaaggcgacacaatcagaagtccaatcaggcaaatcaccagcaccatggctatggctgtactcccaccagccgctattgccgcaagcaagctctgggcagcggcaatgatggagcgcagcgcgcggcccgccgcctgcgcggttttctgcgttgcggtttctgccgcttttgtcatctgttgccgtttggccatctgcatggccgcttctctggcagcgtgtgttctggccgcagtcgcatggacggtggatgagtgcatggcctgttcagaggacagcacagcagatttgctgccctcacgcgcttttggcgcgatccccgcagcgtgatttggtgttttcagttcggggagttggtgcttctttggctgctggatgccgccgcgctctttgattctgcccctgctggttggctcgaaaccttccgtacgcagcgaatcaccacgcagatcatcctggtgccggaaccgccgctctgcccgcctgcgctgcgcctgctggcgggacgctttgcggccctgctcttgaatgaatgtctgctggccctgccgcttcgactcaggcgctgacgttacagcggtctcgccctgtgcgctgatataggcattcttcgtcttgactgcctgcttcatagccgcctgccgtgcctgctcccgcactggcggtgagggcgctcttaccctcgccgcgtcagtctctctggtgcggatgacaggcggcacgttgctgttggagctgggggcagaggcgtcaccctggggtgacgcgctctgctccgtgtttttcttcttgcgctgcttcagcagttccttttcggcgcggtgcaggccactggcggcggtgtcctcaatggcgtcgccgccatattcatcccgccgcccctgctgggcggtatcccggagctgagtccgcagacgctccgagccgtcatccagccccttgcgtaaaagctcctttggagcggatacagctttctctttgacacgctcactcagcgccggtttttctttaattttctccatgggctatcacgcagccaggtccgagggctttgtggtcatcaagcggtagagcttgttcttgggaaaatgatccacgaaaggcacgatggcacttccgcacttgatgaggccccggccggagtctacattggtgatgtaggagagctggttgtctgagatattcagcagacgcgccaattcctcccgatccgttgccgcctgattcagcatgatgagaaattcgctgttggccagcatggtgcgggccgtgtgagactggagcaggtcttcgatattctggctgatccccgttccgcacgcctgatactttctcatacgcttccagagtgtgaacaggaaattggcgctgtactcatgctggaatagcagatagatctcgtcgatatagatccaggtattccgcttcagcccgcggttgcggatgatgcggttgaagatgctgtccaacaccaccagcatacctaccggcagaagctgcttgccaaggtctcggatatcatagcagaggatacgggcattggtatccacgttggtgggttttgcaaaggtgttcaagctgccctccgtaaacaattcgattgccagcgccacatccgtggcttctttttccggctggcggagcagctccgcatgaaagtcctgcagggtcggggcctgcccctgatacccgccgcggatgtattcccgatagacctgggcggtacagcggtcaatgatggacttttccttggcagacagcttcccggcgccgatgagctgctcacaaagagacagcagaaactcagatttcagcaccacgggattctcgccgtcaccgtagccctgctccatatccatggcgttgatatggttgggtgatgtggcggagatgttgatgacctgaccgcccagcccttctaccagcgggcggtactcggattcagggtcaatgatgataatatcatcgtcggtagacaatgccagcgacaccatctccttcttggcactgaaggatttgccggaaccggaaacacccagaatgaaggcgttgccattgagaagctgcctgcggtccgctacgatgagatttttgctgatggcgttctgtccgtagtacacgccgccccggtcccagatctcctgcgccttgaatggcatcagcacagccagtgcctcggtggtgagcgtgcggagggcgtcgatgcggcgcagacccagcggcagcgccgtcacaaggccgtctgcctgctgccagttcagggttgtgagttggcagaggtgcttccgggcaatggactgcagcgtttccgtgtcactgtccagttcctccttgctgtccgccagatgcaccagcgtcaccacggcaaacatcatccgctggtcgcgagtggtgagatcgtccagcatctcacgggtctccttgcgctgttgttccaggtcatagggcacaactgcggaaaaattgttgttgctgttctgtctgcgctgccagttggtcacattggtctccacgcccagcaggcggttctgcatctcccgcaccgcctcgtcggtagggacagggatgatgtcgatagacagcataagacttcggttcaggctggtaagctcattgatcatggagtctttgatgtagctggcatactccttcagaaacagtacccggccatacttattgcccatgacaaagtggtctttcttaaactccatgctgtccggacagacggcgtccttgaaggaacggccacgcttcatgcagtctgttagatccaattggaactgcgtttcttcacccacgcggtagaaatcatgaaggatgcggaggcgctccacggcatccagttcctcacagcgggagtccatgtgattgagtcgggaagtcacatcattgactgtgcggtcaaaaaaagtacgggcttcctcgatatttttcttatgcgccgacagggtgatataacgctcctgtaccacgctgttggaggaatcggtaaccttatccaacagcatggcgttatactccgcccgtccgccgtccagaaaatctccgtgagcaggaatgaggatttcctgttcaaagttgcggcggttcaggcgcttattgttgatggtgatttttgtagtagagccggtatccagcgcgttcagcagttcggaatagctgagaaacatagctgtcttatcctctttggatgcaatggcgtaattgatatcgctgaatcgcagtgtcttggaatacttgctgccaaactgaaagaccccatccggccagagtcgccggatggggatggtgtcctgtacagatctcggtaccttgaattgttctttgtcctgttttaacgttgtctgcagggttttaatcaagattcaatgcctccttcacagatgagtatgccatcagttttgcgtacatattttccgatttgaacacaagccgttttggggtgagaaattccgagcgaaaaaacgccaataaaaattgttccagattcatgccgttgtactggaaaaaaccgcccaaggcaaatgggaacgcggccagaatgcagacccagccgatctcgccattccccagcacggggcgcagtccaaaataaacgcctaccgccacggctaccgccaacagggcaaataaaaactgccgcagtgacagtccaaaaaacaaactttcctgatagttgcgcacttccttgttgatgcgtacctccaatatatcaactccttttgagaattggcatacagcctcttgtatgatcggcacggctatggtaacatagcgccgtatccaaaactgagaggaggctctttgcatgccggtcattcttttgagcatagcaatgctcatcatctctatcattttcaagttggccgccgtatttcgcttgacgattccgctgctgtatgtggtcgctatgaatacattttggcgtagttggtatcaggcacaccaaagcctgggtgatattattttctttgtcctccttggtctggtagtcctgtcttggatcatttctctggttcggaagatacaaagcatcttccagaagcgccaggaagaaaaagacctggagagtattgttcgctatcgtatccgtgagcagcgaagaaacgatgtgcagccggatgagcacggcggctatgccatggacctgagcgacattgaattgtctgacgatgaggattaacccaggcccatcagttcccggatgatccggtcgctcatcttgatggcccccaccagcaccagcatattgaaaatcagttcacctacatagttccacacaatggtggctgccgccagcgtatcgtccgcaatggcaggcggtgaagacgcaaacgccgaaaaaattacacaagccaatatgatgacacagccctccagacagatggcggcatagcttttcaaaaaggctacgcctatactgctggagggctgtcccgcaaaactggccagcggcacaggggcgatggccgttgcgatatagagcttaaaaaaacggctatacaccgtcaggatcatcacaagggacagaacccagataaaaagggagcccaacagcgtcaccgcccataaggggatagaatcgaaaaagccaacatcctcgatgatgctcgccatctcgtccggcagcgctgttgccgacatggccgtcaggccagccgagtcgatgatcgttgtcgccatgccctgggctacccgaaaggcccctgtcatcagttccatgccccaggtcaccgccgcctgcgccagcacaaagcggatgaagcacttgaacgccagttccggtttcttcatctccgcaaagctgccgcaggtttttacaatgcccataacaaaaaacagcaccagcagcgcatatcccaccgctttcaatccgccgttgatgccgacgatgacattccagataccgccgcctttgaaattctccggcgatgtggtgatgagctgccagatctcctccagcctgccgttccacatctccagcgcggagttcaggttgtcaatgatccagtttccacttcccattcaaaatcacctccaactaaagattcaagattgaaaaaatatgttacaaatgctatactgcatttggccccaagaggcacaatggagagagccatcggatagcagggcgaccatatatggggcaattgtcactgcctatcgcggaggtgttgccgatggtttcggattttctaacagtcatgtcctttgtagttctcgtaacagcaaagtcgttatttaattcttgctctcctgattgtctctcaaatgattaagaaaatgctgtggatctgtgatggcccacagcatttttcttatacttagccggtgataagggtaaggatttccttggtaaaggtgatcacaatgccgcctgctacggtgagcataccgttggcgcgctgggagggatcatggctcttgagagacaggcccacctgcaggatgccgaaccccagtaggataaggccgatggcgcggatgagagagaaaataaactcactcagattgttgaccaccgtcagcgggtcgtccgcagccagcgcgggaactgcggtaaccgtcatcaccatggctgtacaggcaaggacggcgtagacgcgctttgcctttctttcaaagttcttggttttcagatcatgtttcattatgcagcagtctccttttcatcgttttgatcaaatcggaacagcggttctcccggcagggccggtgccgctgttccatggtggatatagggcggtgcgccgccgtccatggtgtagcggatggcagggtgattcatgagctcgtatttcagatccagcaccggtctggccccgcggatgaacaggatacagtaccggttgtccaacatccgcacctcatccggggtcagcagttctctgccgctcatctggaagttggtggagtaggaaccggagcgccccttcgtctgcccatgggtcttggtgtcgatggtggacttgcccagggcctccgaaatgtacttgtgggtactgctctcgttaccgccgaggtaaagaagggtatccgagttgccggggatggtttcccacgaatccttatacagttccttgatctgcgccatgttctggatgatggtgctgcaagaaatatttcgggagcgcatggttgccaattcccgcggcagaccgggcagattgacagacggagcctcgtccaaaataaagtggacatgacacggcagcgcgccatggtggatctggtcagcacagtagtacagcgcttgaaatatctgggaatacagcaggctgacgaggaaattgaaggtcgtatcattatccgggatcacggcatagagggcacattttttctctcccagggtatacaagtccatgtcatcatggtcggtgatggccttgatctgcggcagattgaatggggccagccgcacagcggcgcttaccaaaatacttttcgctgtcttgccagagacaaattgtcaaggactttttaatcaaattcacagaaaactcacaaaaggtgccagaagcactgtatggctcctgacacctcatttaacagattacatttttccgttcagcaggtctttgcagagatacgcatagtctggcagctggttgatatatggctcccagagccgcttgatttcggctaactccagcgggtcggctgcttccagtgcatgatcgttgccagtcatatataaaacatccgtagcaacatcatccaaacacttgccgcagagatcggcggcagattctatcctgataccggtatccacatagactggatttacgccaatcgtcagccagacatagcccaccttgtccgaccagagcaattcaaaatcagggctttgccgcagatgttccgcaaagacttcctttactcgctcaatttcatgtttctctttttctgtgtaaagcattttcatgtcctccttgacaaaaattttggtgcgtaccatcatcagtttagcacaaggcggcttagtttatcagtctgtcacatctgctgaatttcatttttgagcatacgcttgattttatcgctcatggtttctgtgctggtattgctgaaatggacatgaaccttgtaggtcgtcttgccgattttctttaccatcgctggcgtgttttccggcgctctggccgcagcagcggcgtctgccatctgcatagtacggggttctttgttcatagcgctcctttctccgaacgggtctgtgccgcccggtaaaaaatcaatcgtgcttactgtttacaatgtcttttgctgcctgtcgggtgacaccggcattttcttcccggaaattcttcccgtcaaagaggatcggcgcacaccgttccaaaatacggtcatagatacgggcgtgggccagatcaggcggatttttcagctcggacagtttcaagtttgttgtgataatcatgggtcttcggctgcgatagcggctgtcgatgacgaaaaacatctgctccatagcatattcggtactgcgctctacacccagatcgtcaatgataagcaggtcatattcgtcaaagctggcaataaactctgacctgtcctcagagaacatccctgtcaggcggttcagaatggtggggaagttcgtcatcagcaccggcacatcctggtcaagtagagcgttggcaatacatccggcgaaaaaagacttgccggttcccacatctccaaacagtaaaagcccgatattgctcttatatgcctctttccagttctccacataggcatgagccttgtccatcaatgggttttgcctgttatcattggaaaatgtgtagtcgtacagataacggtcttgcaggccctgtgcctttcggcgtttgatacgctccatgcggcgctgccgttcttcagcagccttgcgctgctcctcagcctcccgctggcactggcagatgcagtgcggcataaagtagccggatttcccgaagcatggcacaacggtctgcctctggccgccgcatttcttacagtgaatgagcccgtctgacgggtctatatactcgtcctcagccaattccacaccggcagctgccttgtcgatgaatgcccggatttctgcggtaatctcaatcatacagtttcatcctcctttacgctgtaatcacggttgcgggtgggcggggccgcctttttcgcgtcctcaccggcccagcgccggatggtggcggcatggctctgataccgcttaccggtagaggccatgtattcggacagcttttcgatgtactggccccatacagtgggaaaactggcctgcaagtctgccagttcctcgtccgtcaggaaaacattctggtaacggccataggcgcgggcggagcatcccttctctatctctctctttatctctatctctttctctaactctatctctatctctggtggacgaatgtcggacaaatgtccgccgtttgtccggggcgcagaaagagccttgttttggagcctcgcagcccgctttcgctcagcctcggtggaggactggccgattaaaagttcgatgttgctcatgtagaatgtgccgctgtccagcacttccacaaggcccagcttcaaaaagatctgcaaggctctctccacagtgccgatctgctggcgggtgatggtggcgatcatctgcgccgtgtaggggatgtcctcgtcaagctggagccgcccgccatgtttcagcgatttcagatacagcttgagcagaatgttggaatacagcacaccgtcctgcatactttccagcagcacgatggaatcatcgtcaaaatagttttctttgagtttcaggtaataatattttcggttgtctgacatagggttcctccttggggtttctcttgggattctgtacgcattttaaggctattttagggggcagaggataaatctatcagactgcctttgacacccccgaaaaaagccttgatttacaagggtttttcagcccctaaagcgtgacatttctcccgttgtttccgcttgcgctttgcggcgttgatccgcttcatgcgtgcggcacattccgggcagtatttggctcggttggaaccgggggtaaacagcgccccgcatacggagcatttcttagcattcagccggtggaacagtgccgtttccagttccttatcctgcggcaataccgccgcccgaaaccacctgcacaacagggagtaggaaatagactggacacagacacattcttccccatcgtccagggcgatacagtttccgtcgatgtagttacagcactcatgcaccagcctccgcactctgcggtactggcggtaatccatgacggggataggttcagacttattgttcttcataaatgatttctttcataaagccggcaacctcctcaaatgaatttattattaaatattcgtgcaaagtattgttttcttcgtgcaaatggcatatactataattgccagcagaaaggggttgatcgtatggctggaaataccacaaacatcagtatccgcatggacgcagatttgaaagcgcaggcggacgcactgtttactgaacttggcatgaacctgactacggcgtttaacatctttgtgcgccagtcgcttcgtgaaggcggcattccctttgaagtaaggctggaacagccgaacaaagaaacggttgctgccatgctggaagcggaaaggattgcaaaagacccgtctgtaaagggctacaatgaccttgacgagttgtttgctgacctgaaaagatgaaagaaaccaaatataccgtcaagtacacgaccagtttcaaaaaagactacaaacgagccatcaagcgtggcttgaagatcgagctgctggagcaggtcgtagcgttgctggcgatgggcgaaccgctgccggataagaaccgtgaccatgacctgtccggcgattgggcaggccatcgggaatgtcatattctcccggactggctgcttgtctaccgcatagaagatgatgttctggtgctgacgctggcccgcaccggcacacacagcgacttgttcggcaaataaaccgactgccgccgtatggggaaacctgtacggcggtttttctgtgtgcaaaagggtgtcgtgaaacgcgacgcacctaaaaggagtacgccaaaacgcggtagcccttaccgctccggttcccggtcgtgaggtttgtccagttcctgtcgggacaactgctcggcggttttgcggagccgttccactgctttcaaatcctcccgcatggctttcatggcaagcgtgtccgtctgctttccagcggccagctggtcaatttccagctgccatgcctttggggtgattgcctcgccgctgtctttcagttctttcagataccgggccgctgcgtcatacagaatcagttcccggctgtggcgctgttcaaactgttcccgtttttccggctttactttggcaaactgcttgtggatggacttgtactggttgtactgtttccacatctccccgcgctcggtaagggtagtgatccggcgctcggccttgacgatctttccccgcaggtcatagtaacggctgttcatatcagcgattttttcatgaagctgctgcatagactggatgccgtttgcctgtaaaaagctgaatagtgcagcgctttcctgcaaagcccggattttgccggtgcgggtgcggggagcgttcaactgctgctgggcttcccacaaggcggtcaagctgctttgctgcgtttgtggtttttccgcttcgtctttcgaccagagataaagacgggtaatgcgggctttgatttctttcagcagcttgttgtcggcggcgatctgccggtttacttcacccttgtcggtgcggatgccgcgcttttccatttggctggcggctggccccagatggacagagggaatcttatcaatgccctgccgcttgtagctgcggtggtctaccagggcgggatgaccggcggcctccaatgcccggttggtgcaggccgcccatgccgcccgccaaatctccacatttcctttgtcgttccagtcggtggtgtcctcccggtggttcttccagccgcctttcccgtccgggatacgctggccgttttcgtccaggtcgtatgccttgcggcactttgcgccccactgtccattttctttcagaggccggagcgtcagcatgatatggacatgagggttgccggttcccttgtcatggatagcaaagtcggcgcacattcctttgtctacaaagttgtccttcacataggcacgcacaagggcaagctgctcttcgccggacagttcacggggcagggctgcttcaatctcgcgggcaagctggctgtcccttgctttctcgatttgctccacgctgttccagaggatagatcggtctgcaaattccggcggcgcgtgggcaggcagcatgatctccgcatgaacaatgccgcctttccgggtgtagtcgtgggtcatgccgtcccattcatttgtcagcttggttccgctgcggtaagcagctgcggcaacagcagaacggcctgcgctgcgcttgataatactgacggggatatgacagaaatctatgggtggcacctcctttcggcggggatatttcaggctccgtggagccgaacaaacgcgaagcgtgtgtttggctgcgcggggcgcacaaggggtttggggagtgtagcgccccatcgcggacgaagtacgcaacagcccccggcagggcgcacagcaccggcaacggtgtataagtgcgccctatcccagaactcggatagggcgcattatcccagatattcaattatccgaggaaattcttaaatattgctgatattaaaggctttcaaagaaatatcctcggataatgtaatggctatttcagaaaatcaggcaactgattttccttctgattagcaggggtttccttttgatgtgaaaaccatttctcgttccaatctcggatatacctgttcacggtactctgggaaagctctgcgtaccgttcagtcgtagaaatcgaggaatgtccgagaaagtttttgattgctatgatcgggactccggcttctaacatatgtgtggcggttgtatgtctcatggtatgcggggtataacacttttcaagaaacatcttcggatactccgccttggcaagggcaacatattttttataaatttcctcaatgcaggagatagtcatctgcggatgtgtctggctggaaaagatataggcatctaaccgtccagttctgcctgtttcttccagataccgtttcaggaggattccgctaggtttagcgattacaatcctgcgggtcttattcccttttcctgtgattgtcagcttgtacagatttttttcaacaaggaaatctctgactttaagatcacagatttcctgtgccctggctccgcttgcatacatcaggtttaaaagaacctggtcacggaagcccaagcgtttttcagtgtcaggaagccggagcagggctgacacttcatcaagcgaaaaaataatccttggctggctggatgccttttttacaggaatcctccttacagcattcgcaaacacagtcgccgcttcaaaatttctgttctgtgcgtaagcggcaaaggatgtgagtgccgaaagccggaggttccttgtggataccgagcagccccgttctgtttcgatccatttcaggaaactgtcgattgtttcaaaatcgagatcctgaaacacgatttctccggcatctttctttttcacttgataaacatactggaacagaagccgaaaagaatgcttatacgatcggacggtgttaggagaaagacctgatgagagcggcatatattccgtaaaaaactgttccagcagaagcatgaagtcgggaagtttatttttcctcatcgcccacctccatgaatacgctgacagcatagtcttcaaacaattccgtgtattcggggaacatgtcgctgctgaatttcaggtacttctcagtctcgttcatgtcatggtgtccaagataaacggacaggaacggtacagaatcatttaccggacgtccttttttctctgcctgtacaaaagaatggatggcaaagtaatgacggaaacaatgaagacattgacctctggaatgagcctttccaggtacacacaggttggtttgctgtaacagcttcctgaaccgtaatccgaaagttccttttgtaacagctgccccttttttcctgaccgatggaaacaggtggctttccggctctgttttgattgccatcgcaatgcagtacttttccagcattctggttaatgttacatccatcggaacgacacgctgcttgttattcttggcatggcggatcaggatagttccgcgggaaaagtttatatccttcaccctggcagcaagtggttcccccaaccggaatccgcagcccaaaagcatccgcagtaacatacagaactccatgtccatctgtcgcgtttgcgggtctgtgtgcctactgccccagctatcggcactggccagaagcatttgtatttcctcatccgaaaaaatatatgggacatagctgtctgatgttttagggcagtcaggcataaaaacactgtagccttcatactggagataccttaaaaatttccggagatagctcaccttgtcgctgactgttttaggtgcgttagtctggagaagtctgccaatccaacgattcactgtcctttctgagatttcgccggtattttcttctgccagcagtgagtcgaacgaaagcaggattctgcgtgtattctgtaaagtaccgtcactgattgtgccctggctgattgcaaggtattccgccagctcgtttttgaaaatgcttttaaattcattcatgacaaagaccaccttccttccagaaaaccggcaaatgtacctgctgcttccggtacagggagtgcgtagccccgaagctgctcaatgtccagactggcataagaacggatggcattttggtctgtatgtccaagagtttttcttacgacttcataagggatgttgtcattgaccatggaacttgcaagggatgcccggaaggcatgtgctccctgcttgcgtttacctggatcgattcctgctgtttcaatggcagtccttacaatcttagtgattgcctgtactgagatatggctgtaaggcggaataattcggagaaacacatatggactttcattgtcggcacgctcttcctgtaaatatctctccaaagcagtttttacatcgggaaccatgggaagttcaatagtgacactggttttatgctgggtaagcaggatcaggtccctgtcaaaatccagctctttgaatgtcatggatgaaatgtccccgcttctgattccgagccgcgtcgcaaggagcagggctgcataatcacgctttccgtgtggggaagtctggtctatgctgctttcgatttttagaatttcatctgttgtgtatacagaagggtatggctgcggtcttttaaaaagagggacaataccactgtaatccctgtcggtatgaccggactgataagcataccggagaaatgtccggatgtgggaaagataccacttgctgctgactgataagcatacggttcctatattttggggattcatttcctgcggtttcacacaaccgattctggttagggcggataaaaagtaatgtccaatcttatcatgaagatgaattgtactttcctgtagccccttacgtcgtccgtcttcaagatattccgacaaaaaagcatccatctcgggattcagttcctgatacctgcatgatgcaatgtcgttttcgtttgtctgttgacacatggttaaaacctcctcgttattttagtggctttaactgtaccatacatgaaaaacgttatccgagattttctgttcaaaacccagaataccaaacgacatttgaagtttacctcggataattgaatatctgggataatgcgcccttgtaaacaagggacttatggcatatccccggattttggcaggtttgcagtcaattccgcagaccccggaagataggacagggcaatcagaaatgctttgacctctgcgccggaaaggctggaagccagcgggaaaatcccctccaaaatggctccgcgctcaatcaggcggcgggtgcgaaccctgcgttcttcgtttcgttgcttgttctccaaaatcttcttgcggttttcaagctgccggatctccttcaggacttcctgccgttcttcttttgggggttgggctgtaattttttcgttcatgtcatgcacctcttttctttggaaacgcttatagattgaccgtccatttctgacgcgcaaagtaccggcgcagcctccgcagtgcagcgtggatggattttcccgcctgtgatggtgtgataccctccattgcggcaatatctttcactttcatacccagcatatagcgggcgtggacacggcgagcctgcataggcggcagggaagaaatggcttcatacaatcgccgtatcagttcttcgtattcggctaattcttctttttctatcagatgatcctccggcgatggctgcgcccagccgattgcagcattttcgattccatcgttacaatcgagggagtaaaacgccttataccggaacatcttgcgttctctggcggcctcggctctcttatccagaagaaacgcttcgacgatctcatcggacacctccacaaaaatgtcctctttgcaaaatggataatattgtttgagattgatggtctgcataggcacgccctcactctgtttgaaaaaggtcatcatagcagcggcgcatattccgcagaccccgacggatggaaacgctgaccttgctgctgtggacgccctctctccgggagatttccggctgcttgataccggcaatgtagtaggcgtgaacacggcgggcctgtgtcggagtggcatgagccagagccaccggcagagctgctatcaggtgcaggcgggtggtcatttcttctcgttccagcaaaatatcttccggcgatctgctgtgttccagtgcgtaattttccagccagctgtatgcctccagagagtagtaggcgcggtggtagactttccgacgctcatagttctccatctcccgctgggcctgatacatcgctgcccatacctcgtccgtaacatccacaaactcgtcatgccggtagtggggatacatccaccgcagattgattgttttcataggcttacctcctgaaaatcggagaggcgggcagctcgtccgctgtccgcccctcgctgagataagggaaatgatccctttcacttggtagccagaaaacaggtcattcgttaagcctgctctcaaagaaatttataaatttttttctgaccgcctccacactttgatacacagccactttggagcagccgcacagcacaccgatctctgcaaggctcagcccgtcaagcgcatagagcaggaaccggcggcgctgggcctcggtacaggtgtccagaactgccatcagctcatgtagcgtttccatgcggcaaaggtattcttccggcgtttcgccgtaggctcctacaccctcggtggtaatgatgtactcgtcaaactcccggccatcccaatgccgccgctgttcatggaacaggttctccgttttgtgatctgcccgatcaagaaattcatagacttccagcgtgacctccacggccacagcttgtccgttataattgatggtaacttccatctgtccttcctccattcagacttttttgggaaaatctgaatggggtggtggggcgcggcaccggggataaagttcgggccatgctgacccgatgttccggctccatagggacaaaaaagcgcccggacggcataaagccatacgagcgtcatggaatatattttgctgtttaattacatggtatagtgcatacttctgaccgcattgctccgctgctgggaacaggctttttttagctggtgcaggtcatgggtactgtgaaaaaaggcaaacatagacacggcggcatcctcctatgtgccgccgtggatttacacggtgttaggtcgtcgttggtttaggataaacgaaaagaaacggcggctctgaaatcaaagccaccgcttcataggcgcgtggaaatgtgtctgctttacgacggctttttttcttttgccgtcgtccggcagaatgttactccatattcaattcaatgcttccagtgaaattttcacattcaatgccgatatagtttccaccttcagggagtgtaattgtatcactatatgttccggttgtttcaagcaaagtgacttcttcatcagctccagaaatccaaaatacttttgcagttccatccgtaacctccagcgcgcagtcaatagacagatccttacccgcttcacgctttatggaagttccgccgaacaaatactctgtatctgaaaaatcctcatagttggctgtatagcttcctgtataatcatcaattcctttttctttcgtaccttgtaaggatgaatttccggtaagtgctatggaaccagcagactgaacaatattgttatactgatcgagaacttcatcttttgtacaaccggaaagcacagaagcgcccaacagtatcaagcataatgatagaactattttcttcacaggtatcaccttcctttcctgcgtacagcacgctttccttttcccttggaatttgcctgtttacgggattttatttctttttgttactggacatcagtaacaacagcaccgcccagagaaccatgatgccaaccccaatgactgccagcaaaggattcggggctgtggttgttccggcatatccactcatgtcaaagcccactaaaatcagcgcagcagaaaacggatagatgctggcaaggataccgcctttgaagaacagcatgctatatccaaggaaaaacgccagaatggaacctcccagatatgcccctcggatctgcccaaaaatcaagatcagcggcatacagaccaaataggtcgtcagagctgccaacacgatctgtgtacctccatgaaaaaacacttccactgtcagtcccgataatccaaccgtcaatccagtaatcaaggtaacgccaacgctgtatattcccagcaggactgcaaaaatcccgacccaaaagagcttagctcccagcattttcggcatggaaacaggaattgtcatgatgtttttcagcgtatcatgggtggattctctgtcaatcagccagctgccaatcatcaccagtgaaatcggaaaaaacatctgcgtattgccccagacaacattctcaaacagagtggaaaaatcatagtttggatttcggtactccgtctccacaatcagctggctcccatattgcaccaacggacagagtgcaagcgccaccagccccacccaaagtatttggcaccggcgtagcttgagcaattctgcttttaataaattccacataattacacccccttagatttcctggcgccggtaaaccaacgcaatcagcgcaagaaatacaacggcttccccaacaatcacaccgaacacctgaacaccattcagaaaatacggactgatccgttccaacaagtctgccaattccgcactggtctggctttggtcataaaattggaaggtccagcggaaagccagcggtcccggaaacagggttccgatattcaaaccaaaaggctgtgtgaggaacgcatcgctcatcgaaaggatataatttgcagtcgtatagaaaaaggtaatcacgaccgacacgatatagtttttattaagaagaacaacgagcaggatacatggaagtgcgcctacccacataatcagcccttcttctatcccaacgccaaacaaggtccaaaacccaaccggctcccagccctgaaacagcaaaaccgcaagatttaccaatcctccaactgccataaagccaacggcaaacaatagcaaaaccagcatcttggacagcaccaacttggttctgtttatcggtatggtaacaaggttttttagtgtgtcattgtccagctcctcaaacagcagattggaagccagtatcacaaggagcggcatcaaaagcaaataagcactgagctggaacaggctggacatcactccatttacagcatccacatcagtgtttacatctgccagaaagaaagcataagccaatggcatgaaaacagaaagcagcagagaaataaataccaagggcttccgttttaatttcaaaaattcgcatttgattagtttaagcaattccttcgccccctgtcacacgcttgaagtaatcttcaagactttcttcacaagtatgcgcctccgatacctccaatccgttttctacaaaggcagttacaattttccccacaggcagatcaaggttgtgcaggcgcagattgtggtcgtcctgtatggaaaaatggttttcatggaaattgcgttccaaaattcttgccgcctgtgcagtatcagagagtgtaaaccggatatgcttactgcttttttgctccagttcagcaaggctttcttcttccagcaatgcgccgtggtcgataattccaatatcgtcagccagcaaggaaatctccgaaagaatgtgactggaaatcaaaatggtttttcctcttgcgtcgcaaagctcccgaataaaggagcgtacttctgcaataccgataggatcgagaccgttgatcggctcatccaaaattaaaagttctggatcgtgcataacggcaagggcgatggcaagccgctgcttcataccaagagaatactgtgaaaagagctttttatctttgtaaggcagtcctaccagatccagagcatctttgatggcatgattgtttggtacgccccgcagggtagcaaagatacgcaggttctctgtgccggtcagattgggataaaagccgggagactcaatcaagctaccaatacggggcagcaatttcttttcattcccctgcaagggtttcccccagattttgacctccccggaagtcggcttcgttaagcccaacagcattttcatggtagtggtttttccggctccgtttctgcccagcagaccataaattctcccacgcttcacatggatatttaagtcagccacactcttttgtgagccatattgcttcgtcagattttttgtttcaatgatgtaatttgtatccatattcaaaacctcctgttctgtaaggtattctatcacgccaaccttgcattaaccttgccgcaaccttgcattaaccttgcaatttgaaatccggcaaaaatgacaaaggttcccgccataaagacgggaacccgcttaaatctccaaaggaaaaagcaacataaattcagttccttctcccggaaagctttcaactgttatgcttccacccatcttttctacaagctgatggacaatagaaagaccaagtccgcttcctttttcggagcgtcctttatcacacttataaagccgttcaaatatgtgtttcaaatcgtctttctcaattcctactccattatccgccagcagcagctccatgttattttccttctttgacaggacaattttgattttgtctgcatggctgtgagcgattacattttgaatgagattgttgacgatcctcatatagctgtccatatccaatcttacccggacaggctgttcgggaatatcaatgtcataatcaacctgtttatcctcaaaaatcggtatccagtcaatcaggatatttcttgtcagctctgcggcctcaacgctctggatttccaaagcaaactcattggaatttaacttgaaccagtcaaagagcacatcaatatattctttcagatcatgggctttccgtcgggcggtttcaatataatcatcccggtcttttcctgtgaccagtcctttgtgtgcagcgtcaagatacccaatcagagtggtaaggggtgtccgaacatcatgggaaaggctcgtcataagctggcggttggtttcttctgtctgccgtacagttgaaagtctgctttcataggacacaacaatctcattgatttcataggcaagaggtgctgtcaattcatttgttgcagacagaatacgccggttgccatttccgtttttcacatcaaccagcacatcggtcatttctgcgatttgtttttttacgcgccgaacgagaacgatggaagtcagcacagccacaacagcaatcacaatggacaagaaaacgatgatttccatattggctatacctccttattaaagcggtagccaatccctttgaccgtttggatatactttgggcttgaaggattgacttctaattttttacgaagccggctgataatcgccataatgttactgtcatcatagaaatattcttcgccccaaacttcctcataaatctgctgttttgtcaaaatttttccttgatgctttgcgcagtacaggagcagatcaaattcctttggtggaagttcaaaagtgccattttccgtcgtaacagaacgattttcaaggtcaatttgcaatccatcaaaatccagtttttgcacagctccggcttgatgattaaagcgggtgtagcggcgaatgagggacgcaatacgggcaatcagttcgtccatatcaaacggttttgtcagataatcgtccgccccggcccgtaagccccgcactttagaaatgctgtcatttttggatgtaaacatcaaaatcggcaggctgttctctttgcggatttcttccagcgtttcaaagccatccataccgggcatcatcacatccagcaccacaagctgatactcctgctcttttaatttctgcaagccctcttttccggtattacaaaaatcggcttctatatgttccgattgtacgctgcgtttaatcaaagcgcacagttctctgtcatcatctataatcaaaattttattcatggcgtagttcctttccttgttttgtccggccatcaagcggcttctccgcagttttagggagcagccaaacaccggccattttcacagcgccggggatacgcccaccggcacaataataatttaccctacgaggtgtcacgccccatttctcggcggcctctttcaatgtcatatagtccatttcgcacctccacagagtacattatagttctctttctcgaacaatgcaagaaacggaatgtgaattataaacttcaaccaacctgcatatagcaacattccacaggcaaagtatgaattatacaatgtaactgggtgatgttatatggcgaaagttgaagattgtcccggttttgaaaccttcggcgcagatgtcaaagccgcacgagaggcaaagcgtctggcacgaaaaacattggcagaaatggttgggattgaatggcggtatcttgccaacattgagaatcaaggtgcgattccgagcctgcctgtgatgatccagttgattaaggtctgcggacttcccgtggaacggtattttaacccggagatcatgcgggaagaaagcgaacagcggcaacgagtcagccacaagctgaagctttgccctgaagaatacctgccgattatcgaaggtgccatagacggggcgctcaaaatggaacagactgcgaagcagaaggaggacgcataatcgcggcctccttctggcgtttctatatcaagtttcccggcacttttcccaaagttcccggcacctctgctggatttctccggtttctgtcacagtcagatcgcggtcatttccggtaatcttatcttccagaaagttggcgtatgtatccagcaaggcgtttcgcaaatcctccggagttttctgtatttcggcgctgtaccagtcattccggtgaggttcccatgccatcaatgtataaccgtggctggtctgcaccacctcatacagaggatcatcatccagatatgcctgaaacacttccagaaccttttcaaaggtcagcatttcccacacctcccattcaactgcaaatcagttccctgattaaaatttcctcaatctgtgccgttaatgtgttcatcagtcctacccagcgcataggatcacaggctttcagttcctcagtgacacccgcagcctccatcatgtgaggcaacatggtgtccacgcgctcctgcgctgtccaatcaatctctaacaggtgcggatacagtttctcgctcatcagcagttggttgtagagaataggacggtgttccttcaggtaggactttcgcatcctgccgtacttgccgatagaagtttccggctgttcagaaagttttaggttgggtatatcataatctccacaacgaatgtaagtcaacttactcatattcatgctcctttgctccgtgatgattagactgctgcgctggctgctatgctgcctttgcgcggttcttcttttggtagctgcccgatagtagaaaaaacaccttttttcatatcctcagcccggatcagggctttcttagcgtccatttccgcttttttcttcgccttgattttgtcctcataccgtttctgtgcgccgctggctttccgcttcaaatagttctgatggagcctgtccttgcgttcttctcttttccgcaattcttcctgttcctctggggttaaaggaaccggctgtaaggatggtggaatatagcgtcctaaaaaattaaagtagatttcaatttcctgcgtggtatcctgactgccttttcgggagcgttcatggacaaggattttctctacaaactcgttgagcatggtatttgtcagcgtgtcaaaattctcgtacttatcaatcagggctataaatttctctgctgatttctggctctgctcatagccggtaacagccttttccaactccgcaatttcaatctcaagtgcgtcctgctctttggcatactgtgcatcaagcgccttatatcgtgtatccggcagcttgccgagggcgttatcctcatagattttgcaaatcagtttttccagttctccggctctcttttgggcagtagccagatgcctgcgctttttcgatatatcggcactctgttgagcaacctgcgtctcctgaacagtgtgaataaattccgtccggtcatttctcgaatattcagcgatagcccggagtgtgtcggaaaccaatgtcagaacagcactctcattgatacggtgttgtgtaaggcatagtgtcccacacggaactttggtataattggaacaggtatattgagaaatccgcttgccattgttggtgcggtggacatacatcttgccgccacaatcggcacaatagagtaagcctgtgaggggagctgcttcgccccagccgtttggataacgccgtacattgctgcggattttctgcaccagatcaaaggtctgctggtcgataatggcttcatgggtattctcaaagatcgtccactcgtcctcagaaacatagtggcttttcttgtccttaaagtgcttgcgggtcttgaaattgatggtgtgccccaaatactctcgttttttcaaaatgttcacgatggtagatgatccccatccataggggtctttgaccggctttgaacggttcacaccctcgttgaagcgggcaaggtgtacgacgggaatttcaatccgatctgcggataatttgcaggcaatctgataaggcccatatccctccagcgtgagggagaagatacggcgtaccacttcggcggcttcctcatctaccagccaatgctcccgtttttcgtcccataagtagccgtaaatcacagtgccggtcaggtgcttgccgctcataccttttgccttaaacacagaacggattttcctgctggtatcacgggcgtaaaattcattcatgatgttgcggaatggggtaaaatcgtcatcgcctttcagactgtccacaccgtcgttgatggcgatcagacgaacaccgcgttgccgcaaaacctccatgacctgaccgaccttcagatagtcgcgccccaaccggctcatgtccttgatgacgattgcctctacacgccctgcctccacttcctccatcatcgccaaaaatccggggcggtcaaaacgggtgcctgagataccatcatctgtaaagtgcgtagggtttggcagcccattccggcgggcaaaatcctctaacatctgtttttggttggatatggaattgctctcgccctgtaactcgtcgtcccggctcaggcgctcgtacagtggggtaattttttcatttctcatggctgtacctcctgaaacaaaaatgctctaagtgattgcttcactaaccatgacaaaatcatgattaagaagtcacttagagcatatatcacccgccgcctgcttgaataccttatactgccgcagggccacactttccggatgctcatgttccatcgccttaaacagcaggtccaacggcgagatgtattcgtcatcatcctcccggacttcagcgtattccaacacgcgcatgaccatggaaaagttctgttcatcctccggcgcttcctggtgcagcatgaggatgatagcttggagcagagctgtttcggacttcgtccagaacgggtcggactcatgactgcccttgggcgtggttgcctggatcagcgtattcaccagcttcagagcatctttctcgtcccgcaggtagcagaaggggttatagccgtcagactgttccaaattcacgagattcagcacgcggacgtcatagcctttctttttcaggtatccgcccgtgtcggtcagaacttccattttcgggtccgtgatcacataattggtattggcctccaagatgttgggcttcacataaccgcgggtcttggccgcgccgctgccgccgatgaccagcacattcaaggagcgccggtgtttgtgggtatccagccccagccgcacatggcgggtcaggatcttattctgcttttggcagaactgcgcattgacctgcctgggcgagccccacatggcggagccgtgttcctcgccgtcccgcgtcctgccgctctcggcgtcatagatgcacagacccataatgtaggcgccagtgcaaatgaggatggtcaacaggctcttgtccgtccattgaatctggaaagggtgctccagcgcggcggccaggttggagaacagatccggcaaaccgccgccaagggattgtgcaatgagcaacgccgcccagatgaccgggatatagaggaaaaggcgcaaaattaggttgctttgcttggatgtttgtttcaggcaattcacctccgggagaacaaaatagcagtcccatcggcggatcgtgtatcgccaatgggactgctttgggtgatctataatacttatttcattttaccatttttactcttttgccgattttttgttctggccgaggcagacttctgctgctgatccaactgtgccttgtagcccttcagacgttccaacacggaggggcgttcctcactcgtcatccggctcccgtctttggacgaggtcgagctgggcacggtagcgggcaagtcttgtcccgaccgagatcctttttttggctccacctcctgacgttggcccacaggcggtgtcacaggggtgttctcttgggggcgctgatcctgctcgacttgggttgcagcctgcctttcacgggcttctctggccttggacggggcttgctcccgtggaggctgctgtgcctgcgctggttgaccgaggtaatggatgcgctcgaagatcatattcgctctgtcgatctccgttaccggcatgatgacatccaccaccttgccgtgaccgtccgtatcccgaatggcagagaataagattttctgctttccagccttctttttgaatgcctgatactgctccggagacatggcgaaccggcgcacgtcgcgggtctctttcagcatcttcgcgaagttgactttgccggagatcgtcttatggttttttgccagtgccagcgtcagcgccagcatatttttaaggccggaaccactcagccggacagctacctcaccgccggagagcatcatgcgcaccaattggtccgccgcctcaccgcctccgatgttcatgtttccgcacctccttctggtgttcttctgttctttgaatgtcctgttccatgacaggcacttggttttgtatcttatggcagagcttcagcttttgccgctccgtgcggatctcgcggttcagctccgccaactgttcatagatctccgccttttcttccgtcagccggttcctgggaacgccgctgctctccagcagcgccaccgcttccatgtaccgttcaaattccgtctccatgccggtcagaccttcttcatagagcgctttgctgggagccaacgcttccacatccgtcaaagccgtatacagtttttgccgtctctttttccgcacattgaggatggtacgctgcttgatgagtttggccagcgatttctctgtgcgggtccggaaggcatccatatccgcctgggtgacgatctcattttcccgcagaaagtcgaactgtgtgcggtattgctcaaagcgcatgacctcccgcctaagatgaggcgtcatgcggggcgggtactgccgctgcccgatcttacccagcaaatagagataatgcacatagagggcaaggaagccggtgtatttcggatgcgccaggtatggccgatacttaggccgtgagagcacagcgggacggctgcctgcttcaatttccgcaagatttccttgaatagcaacacggataccatcctccgtgaacagcgtattgcgtctgccgggatactggaatctctcctgtccccgcaggcgaaaacccagccgatcaccgtggtggatctcatatcccatgtgttccatgagcaggaagaagtgtccgagatcgttggcatcctggatagccgcccgcaaatccgcttccagcatggagcgaaaggtcggctggcccttggactgccgcagccactccacatagctgacggctttggcaggctctcccgccataataacggacaagccatgctcccggcagagccggtctgaggtgctgcggatctgctggtagtagctttgggcgttactgtggtatttttctccggttatggaatttacggaattaaacactgtgtgagcatggatatgttccttgtccacatggacgccaatcaccgcctcatagtctgccaaatgttcctgtgcaaactctttggcaatttgcaatgccacctccggtgtgacctctccgggttggaaggactggatgatatggtaatactgcacgccatcctccttaccaagttctcgtttggtatccagcatctgacggcactccataccgggatcgcagttcagataggcggtcagaattcggtcatctgttttatctccgttgagtatatagtggatgcctgcatcgagccgcccctttctggcaaggatctttgtgatggccattactttttcgctacctgatacatgagttcatacacacggtccagcagatacagtcctcgtttagcatcctcaggttttgcgattccggcgttcacgctgcgggcaatctggttgatgttgtttccgatgtggtggatctccgtgcgcaattccttgatttcctgagaagggcgcgccttgaccggctgtccttcaataagccgcgcaagatatgcccgttttgtcaggccgctctgcttggcctgacggcacagcagttggtactgttgctgcgtcagttcaatgtgcagatggtgtttgggttcttttttggccacgccgcactcctttctgcggcctgtggccgctgatcatccgcccgcaggcggcattggggactggggatacccccagcaagcgcgctaaatgtacatttgcgctatgcttgcgccagcgccgccacggcggcgttggctttcgccccgctgcgcggggctttgttttcaagcggtatggtaattgcaatattgggcgggcactgcccgcttcctcgtaaaaaagaaatcatctctccggggtcggatgccggcaaaggtacttttcgcttgcgcgttccgtcggaataccatccaatgagagagcactcttttcaggaataaatgccgcatacctggcatatccaaaaccttcggactccaccagcaggccggtgttcacatctcggcaggtcacgaacagacagagaaatgtttcagtttttccatcgaaccccatatccgacacgttccgggatatgaaggaaacatcccgcaaaagctcgttcatgtagcggcggtactgctctttcggcagttcgatcacttttgtgatctggaaccgcgctttctccgggaacggagccttctcgagaatatcccgcacactggctgctttccgataaaaactcgcaaaattttctaacatacttctctccttgtggcagggtgttttgtgaacacccttatagaaaaagcagggtgttttgtgaacaccctgctcttgaaaaaacgtttttgtttatttattaccgtgcctcaagctctttggccatttcccttttccgcagtttttccattgcaaaatcaaggatgcgctcttttcgtgtctgcagcattgtcttatagaactgcttttgcagattcgaaatgaacggagtctcatccacgatacggaaaattgcatccatgttgattttgggcagcatccgcttcaatgctttgttgcaatccgcattctccaaagaggaaataaaatcaaagtagttgatttttttaccattgaccttaatgctggaaagagggattgagaaagtgcgaaaatctcgttctggctgcttatctatggtgtctcgcatgatggcttcatcagcctggggatacaggcagctcccgcagtcatacacaggggcaatggcaatttcgtctgtcgcggtattataaagaaaaccccagtttccgttgtgccgatcccaattcccgatcagcgcatctataatgaatacattccaaaaatgctgctgcaacaacgcgggagggaatgctgtctgatcctccatggcccgcataatgtcagacagttctgtaccatacccgctgtgaccggaatcgatcaccgtgtttttcagtgaggcaaagtcctgcaacacaattccgggagaggtaaaatccctgcaagcaacaacaatcttttttacgccattttttcataagtgccaaggagcgtttcctgagccttgatcccaacgctgttgaaaatatggcagccgatatactcggtaatgcaactgttagcataactcaagtctttattcttgggggcttgtgcggggaacttcagcatatactgttcgccttgataaattacagcccgctttgcgccgtttgcccctgcatagaacttattgcgagtggggaggtctgtaaagtttatcaagaggtatcactctctttccatgcgaagatacttttcgcgcaaataccatgcctgctcgggagaaataatccgttcgacttcggctgagttaatgtccgcgttcagattgcaccagtagatgtcccaatgaggatcccggtttccgccgtctataatgtcccaagatttttgcatctcctgaatagaagcctgcaaatcatcagggagtccgcattcaagatacgactgatccaacggctttccggtttcctgatcatattgtgcgtgattcataactaattcctcacaatgctctcttactggatcgtttttattataccgattttccggcattatagcaagtccctttgccagacagcgcatcaggtcacgcagcttcctccagctctgaacagattctttctcttgccagcttggcataggtgtcggtcacctcaatgccggtggcggaataaccctccagaacagccgccagcaccgtggtgccggaaccggcaaaggggtccagaatatggccgcccggttccgtgatctttacaatgtcccgcatgagctgcaagggtttctccgtaagatgaatgcggttctgcggattgccatatttgaacactcctggcaggcagggcaccggacggctgataggcatatttccgttggaaccccagacaatgtactccgcctgctggcggaagcggcccttctgaggacggctgttgcccttatcccagacagcggtaccccgccagatccaccccgcccattgaagggcatcggtggctgcgggaagctgccgccagtcgatgaacatacatatcggcgcaccgagcttgcttgctttcctcgcctcatacagccactctgccgcccagcgggtccaggagcgctggtccttggcatcgccgtcaaagggaggtggcgcgttctccccatactggaatacttcctggcggtggacttgtttttctcggattgtgtccggcctccggaagcatacgggggatcggtgatgacagcatcgaaggtgttgggggcgaacccgctcagcaccttcagcgcgtcaccttgaatgatctcccatttctggttatcgttcatgtgtgtggtcctccttgtttttgttttttgtgggaatgctgccggataactctgtctctacatactcgctgatgattcccaaggcttcctcatagctgtggcagtctccgcccataattcggttttgcatctcttttgcctcggctgtcataccgttttgccgcagtgtccggcttgcaagaccgatgagattgaaaatattgccgttctgcccgacaagagggcaggacggccttttgcgttcctgttccagcgttatcgctccttcctgccggaacgcctgggtggcgtccggccaatggttttctgatccgtcatcatcggaattcccagcttgctggcatggtggatctcatcccacattccttccgtccaaacaggcccataaacattgagctgctggcaggattccaacagttgcagggacatctcacgcgccttggtatcctgctccgggtcgtttgggtccgctatgggtgggaacagcaggtgtgggcaaacggggatatctccatccgcaaacacctcccgtgccttctgccgtgcgaattcaatattggcttccacatcaccccgcagcggcgcgcagatgaacaccagcttggggccggcctgttcccgttccggcgtccgttcccggaacacggacaggtattgcccgatggactgccggaggacatcgtaatccgcagccgagggatgataggcataccagtccacatctccgcggtcatcccacaggtgaggcattacaccgctgcggaagttcgggttgccagggacaggctttttaccccagacatccttgaaccgcagcattgtccgatccactaccccctccgtgcggttgagcaccgtgaggcggatggcgtcatattgattcgcaacacaggtggaaaggaactctgcccgtacccgcagatccttcccaagttctcctacacagacacgtccggaatactggggatgatcaatgaggtcgctgttttcaaacagctttcgcagttctctttcatagacagtcatcgctccatcccccatttctttggttttttctctttggcaggcggcgtttggctggacgcaaggcactctctgtctctaccccggatgacactgcggccggtgtccgtcaggacaaaggtatcctttgtatcattcaggatttcttcccctggcaaaataacggcggtgccggtaacacggacatccccgcgcacgcttccgtacacctgacagtgcccagacagcaggggcgttccgaactgactcggcacgctgatgatctgggcgcagccggacacacgcgcactgccattcatcacagcgccccgcaggtaggcgtcatcctccgcgcgggcatggttggaaagaacagagccgtgagatacataggcattgtcacaagcaatggcgttttttcgcaggtaagaacccatatccacataggcgtttcccgctgcgatggcatcatcgaagatccaggcgccgtcggacgggtcggttgccagattgctttcgctctccacaaagccgcccagatcccccgctttcacctggtcgccaacatcccgcagcgcacggatgcggtggaggaagggatattcttcgtgggtaatgtcagtgatttcatatttcaaattgctcgtttttcatcaactccttcattatgccgcgctttcaaaaagagacttctgggcatcctccatgcggaaacgggcgtcgatatctgaaaatgtgtctgtgcggttgaatttctcagacacctttcccggcagggcctgcagttccagcatccgttcccacagttccgggtgatgatcatagagatgttgcagttcttttcgtctggcgttgggacagaaccagcagccgccccggtcggtaaacgcatacacaggagaaagcagccctgccttgcggcagagctgcttcgcatcttcctctgtaaacttgtattttgccagcaaggacacctgttgattcttcaggcgtgacagccgtttttgctcatcgtaggcgatgccgatatactgcatcgtgtcggcaggcaggctcttttgatgccgacaaatcggtttgattttgcagtcccgctggacataacactttccgcagattggaaaggcccgcagcatccctttcttggggccgcgggtgaccgtccctgtgaacaggtctacataggttttctccgcacgcagaacacgcaccttcacccccatccgctccagctttggaatggcggtgtgatagataaagtcccggtgttccggcacctcacctgaaatggttttatcaaacatcacctcgcagtagacggcttcgtccagcggttccccatgctccagcgccagcaaaatggtggcaagactgtccttaccaaagctgcagctgacaatatgaagaggttttgatctttcttttgaaatggtatcactccttgtttttcttattgttccggctatattgtcagccgggtgattttttggtataataaaaaatattattttcagccactatctaaacaaaggagaaaacaacatgaacaagacggaacttctcaccgctatggcagagaccagcggccttgctaaaaaggactgcgacgccgcactgagcgcattcattgataccgtggaagctgctctgaagtctggggacaaggtccaactggttggctttggcacctttgaggcaaaagagcgtgctgcccgcaccggtaaaaacccggccaccggtgcgaccattgaaatcgccgcttccaaggctccggtctttaaggccggcaaggcgttcaaggacagcattcagtaatacctgacagcgagaggcgagtcctctcgctgtttttttatcagcgggcggaaacccctgtctccttggcgcggcaggcgctttccagcacctccgtcatatccgtctgctcccacggggcatccgcgtgggtgaagtgtccgtagttgcagaatttgcggaaaataggtttgtccaaacccagcgtatcgatcatgccgttcggcgtcagctggcacaccgtgcgaacggcctgctccagtgcagcattggagtacttgccagtgccgtgggcatccacctccactatgacaggcttcgccctgccgatggcgtaggccatactgacggtgcagcgttcagcaagtcccgccgccacaatgttttttgcgatgtagcgggccatgtaagcgccgctgcgatccaccttggtgccatccttgccggacaacgcgccgccgccatgtggtgcgagaccgccgtaggtatccaccatcagcttacggcccgtgagtccggtatccgcttcaaagccgccctccacaaatctgccggaaggattgatgaggatctccgtttcggcatccagcgggaagtcctgaaaagcgggctggataatatgtcgcatgaccgcatggcgaagctctgccagctccacaccatcctcatgctggcaggagaccactacggcagagacacgcttgggaacgccgaactgatactccacagacacctgcgccttaccgtccggcttcaagccgggaatcgtgcgcagctttctcgcctgggtcagcaggcgggtgagttcatgtaccagcactaccggcagtggaagaagctcaggcgtttcatcgcaggcgtagccgtacacgataccctggtcgcctgctccggtctccgcgccgctattgactgctccggcgatgtcggggctttgctcgtgggtgatcacctccacctcataatcgctgccgccatatccggcttcccgcacggtgcggcagatgacggcagggatgtccgggagccacgccgccgtgatctcgccagccgcgatgatcttacctgcggtagccatgacctcgcaggctacatgggcggtggggtcatgctccaggcaggcatccactacggcgtcggcaatggtgtcgcagagcttgtccgggtggccctcagtgacagactccgcagttaagacatacttatctttcatgttcgtttttctccttattgcattgttttttatggtttccggacggcacaggaacagaaaacaccatctcattggcgtatttctttcgatacttttcgatctgctgctccgtcagggatgtaaaatcctcatctccaattccgactacaaaaaaggtgccgcagacaatgtcatacggcactccggattcatctgtcagggcacggttcataggcaatcccagaagcttgccctctccgtgacagacgagcgcgaccgggtcatcgaacgggtaaacagcctcaatatctccacctacgatccgctgcatggattccaggctgccgtcgatctcctgtacagtgggcgttttcatcggctccaccacaagaatggtcattttttgatgattgataggatcgcctcctaaaaaaaacaagcggcagcagcagtctgagaccactgttgccgcgaaatgatttgattatttttttgttttcagagccagcgtttgtgttttcagcaaagcattctccaacgctctatggtcctcgtgatcctgccaccagtgggggcgcagaaaactcagtgctttggtggcccagatgtagtcatcccgccccagggactcctgcacgagtccaagtcggaacttttcgtagttctttcgtactgccgcatctacgctgtcccggttcaaatacagttccagaaacccacaaaggacagccgcttcctccatcgtataaaacactacgacacccctttcacacaaacaggcatcattgtagcacatacgaagggataatagaagccctatcacgatttccatagtcaagcgcgccaatctgcgcatctccgcagtgggaatgaccagccgaagaatgtccttatgtgttccccacctttcgcttttagggcaaaacgattccaaaaacgaggaatggaattcccctccattcctcgttattccttgtctggcagataagtcactatatcagccaaagtacaatccagtattttacatagcgcgtccaaagtgttggtcgaaacggattcattcgctttcagcctccggatcgtagaactactgatcccacctttacattgcagcgtatatgtggtcgctccacgcttttccatcgtttcccacaatggggcgtatgagatcatcccggttcctccctccgtttcgcgctttacatatcttcattattgcctataatgaacatatagcgttataggcaatattgcccatatcaggacgttctaaacttgaaccgcaatgggaggaaccataatggaaacaaaagtatgttgtgttacgggacatcgggatattccaacagatcgggccgtctacgtagagcaagcgcttcgacgtgaagtcctggcagcgattgaggatggatatacccgcttcatctctggttttgctgaaggaacggatctcatgtttgcggccatcgttgccgagcaaaaggaatacagccccaatctgtatttagaggcggctttgccctatgcgggcaggatcaaaacaaaaagcaagcaatttcacgatttgctgcgaatctgcgatgaggtcacggtcgtatgccaagaatataccccttcatgctttatgcggagaaaccggtatatggccgtgaagtcccagcgtgtgattgccgtttatgatgggcgagatcgtggtggaacgctttacaccatgcgctatgcccatacgctggagaaggaggtccgggtaatcgaggtatgaactttgtgtgatttgggcgactcaaacgttgcatcgcccgacgattttatgcccatcttacgaagttacctctccggttttctggtttttgggtttttcccattcttcggcctctccacttttcctaaccagatttcgtcgatggtcctgttccacgcttcctccagcgattccaccggcaagccattggcctcgaagccttgctggatcgcacggtaataatacggagaaggcagtgcgggctggcggctcatcggttctgccatgatataagccatgacggaaacggctgcgtcatctgtggtccgcacagatacctgctccttggtgtagtggcgaggatagccttcgtagcggtccagcgcctgttcagacttcggcgtgagcttccatagcagaccgtggacgacgctgcctttcttgggagagacagtggcaaagccgctgccgcggaactgcaactcatagttctgcagcgtcaccggcccaacgagctgggcgtctggacaacgatgctccatctgttctaaattgatattgctgccgtaggcgaaatacagagtttcttccatcttagtcccccagcagtctgagtccgccgattctgtccagatggcggaacatggcctgcgcctgcgtttccgtatctccatccggcagtgggcagtccattcctgtggtgcggatgacattgctctgtaaaaaccagatgtagctctcgatgtccgggaactctgtgggatcaaaggtctggtcccgcagacggcccatgatctccgtggccgttccctcatagacggtttcttcgatctgtatcttcaatggcttcacctctccatttctctggattttttcttctttttattggcttcataagtatccttgtcatagcgccatgcccgatcaccctccagattggccagcagatgattacgggtattcttgaactcgtcaccgttgagtcccagccgcaccagccagacacggaaggtaaacagttcgttgtcgctatgggttttccgcataacggtgctgcgctggttaatggcttgggcagacatggcaaggcataaattcacataggccgcgacctttccggcatgaagcgtagagttgaaacaacgccactcaacggttcctctataaaacacagagtgcagattcagggcataatagcgcgtccagttatagtgttctcggtcagagatattcccttcataccagatgctttccagcgccgtgagattttttgtttcgtcagaggagagcttgcgtgcttcctttagcattggctcccgcaccttctggcagtattggctgacacggcttgaatttacctgcagtgctttgaacaggatatcctccttggagtacataatgctcagaaggtttttcagactctggcggttgtggttggcggcgtccacatgaacatggataccgcaggagtggttgactttggccccgacatggcgcacctgacggacacactcctgaagcctgggtaactccgcgtaagtgagttttggcgtcaccatctcaacccggtattcgatgttgctggtatgcatatacccgctttcagttttcatttccgtaacaatgctggaatcgctcataatgctccacaccttgccatccgggtctttcacgctccatttatcgtatccgccccccacatagtaaggttctgtgccaaaataattggccagcgcctgcgcagcctgcccacgagtgagtcccgtcatctcgacctcaacgccaaagcactgatccttcattccgatcatgcggcggcccccgctttcaattcctcgtccactgtctggatacgcttggcaatcgcctcaattacattgacggtgacactgttgcccgcctgcttataggcctgagcgtcagactggatggcgaggatgcggtcaatttgccattcctcaaagccctgaagccgcaggcactcacggggcatgagacggcggatgcgtccgccgttttccacgatcccctggatacagctggtttccagcgtatgggcaatgtcacgcccaacgcgcccgcggcgggtgttgctgcctgcgtagcccaaatccaccgtatcgccgggttgagcctccttgtaccccttcttggtcgcctccttgatgagcaggacaccggagcgctcgcctttacggttggacagtgtggtctgtccataccgggcggtgagacagcgggcagcgtccgtttgctttggatgcccgctgcaaaggtctaccagcacagcgttttgtgtttggttccggttgattcctctgaaatcgctggcgttcagcggaattgctgtatcccgctttccgacgatcccatctttccggttaaagcccaccagatataatccggtcttcccgcccatgccaccagcgccggcagtctgggtgcaggctactccgtctgcgtcatagatccgggagccttgcggccctccgaggacttgtacaagagcttttccacctgtgccgaagacaggtaatattttcccggcgcatcggggatcaagatatccgataaggaacagccttcgtcttgattgcgggactccgaaacatttgcttaatgtatagttgaaaataatgtatagtcacctcctaaaactgatgaaaaatcagaaaaaatcatcgtcacacttaacataattccgtataatttaaacaatggcattgccatatcaactaataggaggaatatgctaatgacgatagagcacacaggctcattgagcgaatggctcaggaaaacgatcagcaagttaaagtcacacttagctgaactcggctacagtgaaagcacgattttaaggttagacgcgacatggaaggagttgattgtatactgcgaagcgcatcagacaactgagttcaccgtggatttagagcggagatttgtctgggaacggtatggtgccgatcttggcgatagggatatatctcagaatgtcagccgggctattcatatgttggacgattatttacagtatgggatggtctttaagcaatcaagtatcaccttgaagggcttttctccagcctataaggagctatttgaaggctttttggacagtttgcgccaaaaccaagtggctgaaggttctatcagaacttggcggagcaggctatttcgctttgagtattttctgctggagtccggcattgagcatttccacctgcttgagctgcaccatgtaaatacttatattgaatctttgactggattttctcccggtacggttgcggcaacaattcgcatcttaggcaagctgtttgattacgcattggccaaaggctaccattatatcagttacgccaatgctttgccctgtatcagacggacgcataagtatcgcctgcctactgttttttcaccggatgaggtagagtgcattctgactcaggtagaccgatccaatccgttggggaagcggaactatgcgatcctgttgttggttacccggctggggctgcgcatcagtgacgtgcgattgcttcgattcgagaatattgactggaaaaacaagcgaatttcaattcatcaacaaaaaaccgggatacccttagaacttccattgctcgaagatgtgggctgggcaatcattgattacctccagcatggccgcccagagacagactgtccatgtatatttgtccggcaccttgcaccgtttgatgtcatgagcggttctatgcaaaggttggtttccaaactcgtttctaaagcaggtattcatgtctctacggataaaccgattgggatgcacagcttccgacacagtgtcgctacctccatgctgaataatggagcagaattaactgacattgcgcaaacgctgggtcatgccacaccggaaagcacacaggtatacgttagcctcaatacagaaatgctgagacgatgtgcattggaggtgcttctatgagtaagaagcccttctttacaggaccatttgctccaatatgcgaatcctatgtggcacaaaaaagggcatctggtctggactataaccagcaggccaaactgctgcggctatttgataatttttgtaaagattatgagattcagagttacacaattacgaaagagattgcattgacatggtgcaagaagcgcccaaatgaggcggacgccacccgatatagccgagtgagtgaaatgcagaggtttgcccaatacctgtgcaaacaaggttatccatcctacctgcttccagcccttcccaaatgcggagaacaacacgtaccctatattttttcaacggatgagttacatctcatttttgaacgacttgactcactttctccgactaacctatcccctaaccgacatcttactatgccactcttatttcgcgtactctatggctgtggccttcgaatttctgaagcgttggcgttactaaaaaacgatgtggatttgaaagacggaattttgcacatacggcacggaaagaatgaccgcgagaggattgtcccaatgtctgccacattgacggaagaatgtagaaaatatgcgcaggctgttcataaaaacactgtcgaatcaacgccgttcttttatgcaaagggcgggaccccttatacaaaatccaccattggaaagttctttcgcggcattttgtgggatgtggggattccatataaagggaagcaatttgggccgcgcgtgcatgatctccgtcatacattttgctgccataatatccaaaaatgggctgaagctggactcccaatatacagcaatctactgattctttcccgttatgttgggcatacatcgattagttccacccagtactatctccgcctgaccgcacaatccttcccccatatcatggatatttgtgaacagaatttgggcggcatgtatgctccgtttgaccttgccatggaaagagagggattgcaggatggctaatcgtggaccgactttttttgccaaagcgttatcaagatatttctttgagtatttaccatctgaaaggggactaagccaagaaacaattcaatcctatcgagacgcaatgtccttgctactggatttctgtgaacgggaacgcaaaattcgaagagataggctggaagttagcgatttcaatagagagctaattgatgctttttttcggtggctggaacaggagaaaggtaactctattacgacaaggaaccaacggcgagcagcaatcaatgcgttttttaagttcctgcagtatgaagatccaggctttgtactgctatgccaacagatccgggaaattcctccgaagaaatgtgagcaaagggttgtcccgcatctttcggaagaagccatccaaactatttttggacagccgaaccttacaacgcgtgagggacggcgtgactttgccttcttgaccttaatctatgaatctgctgctcgtgcatctgaaatcgctaaccttcgctttggtgatatccgttttgataaaaaatgggccgttgtacatctgaaaggtaagggaagaaagttccgagatataccagttcttcctgtacctgcaaagatcttgaaggattatctggctgaggaatcccaatatcgccaatgtgatatagatgccccgcttttttgcaacagaagcaaggcccctctaacacgaggcggtgtctactacatcatacagaaatatgtttcccttgcacaaaaggagaagcctgatttgttcccagtgcgggtccatcctcatgtattcagacacagccgagcgatgcattggttagaggccggtgtggatttgcaatatataaaagacctgttagggcattctgacattaaaactaccgaggtgtatgcccggctgaacattaaaatgaagcaaaagctgttggagcaagtgcatccgcagcagcttagtgaccagcagccctcttggacagatgacgaaaatttgatgcaatggttgactcagctctatattccaactaaataatttcacagaataatgtaaagccagcaggagcattcttgctggctttactacacttcaggaggtgactttacattattttctgctatacattagctcaattatgttcagctgaacataattgagcgttaagcacagtccattcgacatggtaccccaggtcatccagtgcggagaggatgaccgaaaaggttttccctttgtcatgcgataaaaggccgggaacattttcaagcagcagatacggaggtcgctttgcttgagccaatcgggcaatctcaaagaagagagttcctctggcgtcggcaaagccccgtctgcggccagcgttagaaaatgcctggcaggggaatcctccacagagcaggtcgaagtccggcaggtctgcgggatcgagtttggttgcatcgggatagtatcgttcctcctttcccggttcgtagattgcttgataactggcattggcgtgcttgtcgatctcacagtgtccaacacaccggaatccgcccgcgcgggtcaatccggagcggaagccgccaatgccggcaaacatatcaaagtatcggatcagtctgtatcatctccttcctgcagcgacgcaagaaagccgagaatatcctcgtcgatgctcccggcctgcggcgctgcttgtgcgatttggatctggctgccctgcaattcctgacggatcacctgacgcacagcctccagcagttcccgctgatttttgtgttcacagatcatccggcagacggcaccggtgcgttcacccgccggaatatccatcagcgtccgccacgcctgccgctggatgggcgaggccatggagaaggacaggttcagccgcttcttgtcactgctcatgctttttcgacattcgctctgtcagacgctcatatcccttggcatttaagcaaacgtcatccagtatgatgggacggcatagtccgtccgcagcggaagcatgatgcttcagcagcgtcgcaccgccgccaagaaaaacagcaggcatggctcggacgtccaggccgctctccgcgatggcagagagcaggcgtttggtgtagcgttccgcttcctgataaatgatttttttcgcgtcctcgttcacatggctggcatcgccgcgcagaacgctttcaatctgcgcggccgtcatagacagaccaaggccacggcggatctgctcgctgatctcatccaggcagcggatcatgccgagctccagactgcggcaggtggcggcgttggggatacggttgtccagccgcatgagatccaccgtccagccgccgatgtccgcaatgatgacggatggctcatccagcatgctaccctgcgtcagcactgcggcatagccctgcggatacagcgacactttggagatcgtgatgacatagtcctgtccttcataacggaaagacaccggtttgccgccccggcacaggtagtcccggaacgctttcttatccctgccaaagctggtgagcggcagtccggctgccagatggatgtccgctgccgttccggcattgcggtatgccagttcctttgctatggcggccagcgtgagaaggtagtaatcctccgtttgggtcttgtccttttggagcggctggcgtccgctgcccaccacataatatttaccgccgtattccagcacattgttcagcgtgtacggctcatgctcatgggccaccagcccggtgtgaaaggaaaaatacgcggttttcatggcagcgtagccatgatctacaccgatgatgatgatgggttcgctcatctggcctcacctccatgactgcggtgtttctttttgggcgcttgccgctggtcatacgcctttccggcacggatgagatcccgcatttccttttgctgcacattccagcgtgtcttgccatcccagcccggatgcgccgtgcagagccgtggcaggtactgtttcagctccggtccctctctgggaaattcaataccgcctttgtagacgatatcctgttccagttctgccagcaacgtttcataccttgcccaatccgtctggtcataggcgcttttgcctgtgagctgctcataggcataatctcccacataactgagcgtctcaaagcagcagtcctcgtaggggatgacctccgcaagagagtccgggtccgccagcgcggacagataggtatcccttccctgggcaatgagccaggcgcggaagtcgataaatccgtcatcgctgcagccgtattccttcatgaccccggcggcatcccacagtccaaacttgtccgcaagatcctcataggcgtggaggatgtcgtgaaagttctgtgcctgctccggccccatggataccagccggtctttcaggaagtccatcatagcgtccatatcctgtccgcaggtctcctttgcactctggatcagcttccagaaggtatctttgttgatctcggtgatgttatcgttcatatcctacctctttcgcttctttttcctttgttttcaggagatgtgccaaccccatgcgccccagcgcgtccgcgcagattgcttcacgaaacgcgcggtattccggcgtggtggtgtccaccttgccgagaacggcccgttcataggtggttccggggacgatctcccatgtgactgcatcgaaatgagctgcttccagatagcgcagaagggtatgtccgtccgctgcctcaaacgcgccccggttatcttcataagggaaagcgtcatagggctggaagccggtgctccgctgcgcggcgcggtacagccgaaagccatcctcatccagctgcgccgcgaatttacggtagatatccgtcgctgacaattcacgccgccccatccgaggtctcctttctcacccaagaagcgaagtgttccagaaaacgaacacgcttgcgcacctttccggcagacacatccagtccgttcatctgcgcctggatgcggtgccgaatggctttcagcttctgcggatcgttgcagcagtccacgatgacatactcaccgccactggcggccagtacctcacgcttgccggtctcatcccgaatggtggacataaggcgctggcccagccgtttccgataggcatcctgcaaggcgtccatatcgccgcagacgccgtgccgcttcaaaatggcggcgatctcctgagaattgatccgggtctccgcggacagcctgtccaggatctcccgctgggcgtcaggagggagggtgggcggcgaaggacttttcttctggctcatcgcgtcggcacctcctttttggcattttcgtaacagtcggcggctctgttgcccgcgccaactcctttccatgctcattcagatatctctgcatttcacggacactttggcacccaaactccggttcctgaaaaccgccacgctccgtatacagcgtccatttctgcttttcataagggcaatcctgagacaccacaaagtaccgtccgcagcggtctccctccaacggctcaaagcgcacgtcatcatagagggggccgtccagagggcagttgtttttaaaccagacatagtaattgtccagaatggcaggctccgtgatccccatgaccaccctgccgatcctctgcagtctgccggcaagagccgtatcgctgcaaaaccagtcataccacccggcgcggatctgcgtctcacgggatctatcctgaaacgccccaccgcggaacaggtcctgccactggcgagcagaaagcatctcgctcatgacgccacctcacagggaatatcctccgcggggccggtgtttcgccagtctgcaggcaggatcttctgctcgatgatatcggcaatggcggcgaacacctgggcgatctcacgggattccttgacggtgtcctggagttcctccggcgtcatgcgggtaccttccgtccagcagcggacattttcttccgtggcggtcagaagagaagccttttcgtatgccttgcagaaagtgtttgcaactttgcccctgcggtcgatctccgcattttgctgtttgagatccttcttcgccttttcatattccagcagctccgcggcagcctgttcccgctgatcctccggtacctcctgaagctggcgggtcaggtcataccccttgttgatggacagtttctttttgtccagtgcctccttgatggagtccggggcgttctcatcgatctgcatgaccttgcccatcgtgcgctcgcccaagccgaccgcctctgccagttcctttctggtatcgacagcggaaaccgcttccggcaatgttgccgaaagcggtttttcagagaacttgtcaccaccggcagcagactgatttgctctggccttggcttcaatctctggttttagcttcagggcgatcttgcccagctcccacttttcaaggttgcggcgtcccttctgggtatccaacgcccactgcttggcctccaacagatcctcaaacgagaaaacggccattgtgtacggcagatcatgcttttcgcacagtgcctgacggttgtgcccgtcgatgatgaccatgtcctcattgacgatgatgggtgcgtagcagccgtttttgatgagatctgcttccagagcgccgagctgctccgcgctcaaaggcgggagcagctcggccatctccggcaggatcacagggctgcgttcagcgctggtatatgtgatcccggtatttttcatcaggcagcgacctcgcggacaggctcatcttccaattcctgcgccgtttcctccaccttgcggggagagaggaactccacctcgctggctttgatgaggaaaccgggctgacgctccggctcgtcctcaaaggtaatggtctcaaaatcgccggaggccgccagcttgcagcccttccaggcgaattcggcgcaacgctcggccagcgggccgcgcaccttaatggagataaagtcggtgagcttgttgccgtccttatccttatagcggcgatccgaggcgattcgcaggatggcgtagggcttgccggtggtctcgttcattttcagttccacatcgttggtcaggttaccaatggcagtgatcttcagcattgttcagttctcctttttatattatgatgtttgaaaagccgcccccccggcatcgggagggcggcagagtgtttacttgctccagctttcgctgtcaccgaggatggcggtatgggcgttggcggcctccatgactgcgtagtacgcccaatgcttgcggttgacatccgggaaggtgttcatcttgcggagattatccacaatgtagtcctcatccgcttcgcgacccagcaggcggttgacgatggtcacaacctccgcacggttgatctcgtcgtcagcgcgaaaggagccgtcaccatagccgttgatccagccatgcttggcggcagccttgatgtacgcggcggcccaataaccgtcgctcacatcgttaaagtccttatactgttccatgatctcagcatcgccatcgccgtacacatcaaagaaacggacggccagcgttgtgaactcggcacgggtaatggcatcgttgggggcaaagatagtcttgctcttaccgtaggtgacaccgttgttattgaggtatttggcataaccggagtaccaggcatgggcgggaatatccgtaaatctggtgttggccacggtggaaatggtatcgccgttcttctccgccagcagacgggcgaagatagcggcggcctccgcgcgggtcatgctgcggctggggccgaaggtcccgtctgtgtagcccaggatataggtgccgtgacgctctctttcctcgatttccggaacggtcagctttccgtcctgatccgtcttgcccttggccgtttggctcaggtcgcccttaacaatgatgtttttattctcctgcggatttttcttgtggtcggtgacggtaaccgtcacacggtggtttttatccagatccgtgccatccggcagtttgaccgtaatattgccggtcttgccgatggcgacctccgcgttggggatggggcgtccggtatcggtgtgctccaccttgatggtcagcgtccagcggtcgccgtccgcatcctcatagccagcagtgaccttgccgtcctcattggtcttgccgctgccggtgggaacggtgatctggcccgcggcgtcggtcttactggaggcgtagttatcattcttgtctgtaacggcaatgctcatgcccggtacagcgctcttgtccttgacgagctgcacggtgacggtggtctgatctacgtagtccagcaggcggctattcggcaggcggatagagatcgaattatccttgtggagcgcgacagcggcgtttgctacgggattcttggtgtcggtatcggtgacggtcacaaggtagccgcccacaatggcctcacccttactgtctgtggtggcgctattgtagatcttttcgatgggctgtgtctccagcttttcgccacacacggtacactccttgtgcttgctgccctcggaatcggtggtaggctgcttgtcaacgatccagtcgctgggcttatgaccggcaggctcggtgtagttgctcttgttggtatcgccgcagcgagcacaggtgttagtggtataacccatctccgtgcaggtgggagccgtcactgcggacttgtaatcatgtcccagagccttttccagcacagcgccgcagcgggtgcagagctggggttctgtgcaggtagcaggagcgccggggatatggccatccgcggggtcggcatccagacggtggcaaccgcagcgggtgcaccggtattccatgaccccctcgccagtgcaggtggcgttggtgacaagggtgcccttgtcccagctgtggcccagggcgtccgtatagtctgtgacaaaagaaccgccgcagccatcgcagcgatggatggtctttccctctgcatcgcaggtagcctcgatcacatgggccttgtaatcatgcggaatggtgggcgtaatttcctcgatatggcggtcgccgcaaacggagcattcccggacggtatagccggggctggtacaggtggcagccacggtatagacctcatagctgtgttcgcccttgggcgtggcggtctgcttcatctgtccacagcgggagcaaagctccagcagcttgccatcggtttcgcaggtagcgtcacggatgacgatgccctgccatgcgtggcccagagagtccacatagtcgcgcttttcgattttgccgcactccgtacagaggtagcggtcatagccgagggtggtgcagccggccttggtgctgtccagcagaatatacttgtggttttcaccacagcccttgtcggtgcagcaatttccgttgcagtgcttgtcctgacagccacagttggggttagagcagccacagccgcagttgccgttctcatctgtggtgtcatcccgcagccagacataggccacaccgttttccgtcatatccacaccgtcacaggtgtaggtaatctcgtaatagacagtgtattgaccctcgtccgtatagttgggtgcggtggtcatggtgcagctatccgcgctgttgccgtagcggatggccgtgcggacaccggcttcagacaagtccgtgacgctgatggtatggggctgtccgtctgccacgccgtagtagctggcaacaacggccttggccgccgtgtagtcatagcaggtatagtcgcacaggcggcacttctccacggcagcgaaacggccatgagcgggctggggcagagtctccaccgccatgtcatggcgctccagcacagaggatttctcgtaattcgtaccgtaacagaagcagcagtaggtgccgcctttggtgacagtgcggtggtacttgctgtctacacattcatgggtaacggtctccggcagatccagataaaatttggcggcgcagtcatgcagaacgtagatgttcttatcccatgcgtagggggcgccgttggtctcgttactgttccagtctccacagcggctgcatacggatttggtccagtggtaaccggtgtaataggcgttctcgccggggacaccggcatccagactgcctaccgttacttcgtcaatacacatcccgttggaatacttgacgttgcggttcagggccgtctcaccggagcgggtatactccggaacacgccagacggtgaaatccgtgttttcccggcaggtggcgcagtagaaggtctcgtgggtgacgatggcgttgacatccagttcattggtccggttgctggcctgctgccaatgctcgacgggatcatggtagctgttctgctgggcggctgatgccgtggggatcatgccaaggcacagggccagtgttagaagcatggccgttacacggtgggaaaagaaatattttttattcaaatgcgaacttcctccttatattttccgaataggtttctttggatctttcgtgttgattacttgattaccgcccctctcaggtgtttttcttttttgcagatactcattccagtccttgccgctgtggggttcctccacggtcacgacgtagcccatggctgcgtatttgtcctgtaattgccgagccgcctcccgtcccggcccatctgcgtccaggcacaattcgatccgtttgatctgcggatgatctgccagataggcttgcagcgcaccgccataaaggccgcagagggccagcgcgttcggtgtgttccggtggagtgtgagatagctcatcaggtcgatgggcgcctcgaatacgaaaacctgatctgagctgcggtcatacgggagtgcgaagccaacgcgtttatcgctgcccgtcacatctccgcggaagcccttgccctcccggtcataggttccgcgcaggcccgcgtattttgcctgtcccgcgctgttctttccgacgaacacgcagttgtgatgctcggcgtcctcatacagcaggccgctgttcaaaaattgacggatcacctgtggggcgatgccgcgcttgtgcaggtaggcaaacaccctgcgatcatccgtattccggggcggcagggtaaagggcttttgcacctcgtcacgcttgacaaaaggcgccgctttagcgggagagtctctggctttcccgtggaaggtcagcaggtattccaccgcttccggaaaggattttccgcaaaactgctggagaaaagtaatggagtccccgccggtattctgcgagtaccgaaaccacttgcggcggtccttgatccgcaggctgtccatttccgctgtggtgtggtatctgccgatccgccgcacctgatagcccaaatgggtcagcagttccggcagatccgtttccttggcgatctgcatttctgtgtctgtgaagcgtcttttgatctcgcttgccatagtgatgacctcctttctggtgaaacgcaaaaagccacccagggcatccgagagattcggatgccctgggtggcttttccctaaatcgtgttcttttgtttgggctttaacgcgggcctacacggcgttaccttcgtggggggtgtccgtgtccgctggagcggtcacgtcggccacacggggcgcgacaggggcctcagtgggggtgttctgctccgtggcgttctcagcgtccgcttcgtccagtgcctgcgtgatcaggttcagcacgaagtctcgctgggtgagctttttgccgctgcggagcgtctcgcgctccaagtgacgcttgatgcgctggaagagttcttcgggaatctggaatgccatcgttctgcctttttcagtcatttgaatgccgcctttctgattttccatcatgttgtaatagtcttggatgaggttgacgatgtactcgctggtggtcaggcccagccgttctcgttcttcactgacccgctcatgtaggtcgatgggaatctgagcacacaagtttttagtggttgccattctcggatacctcctcgttttttgtaacgcaagcatacccgaaaggttacgagaaagctattaccaacaccaccaaggaatggcagacaaacgaagcgaaagcaacataagcaccaatgaaacgaaaaaggccgccgttctctcccacatggggaaccgaacggcggcctgccttcttatgctttattcttttttagcctcggtgttcaagtcacaccagtccataagagcgctctgctgaatctctgaaatgtcgcctctcgcgtggaaaaaccgattttccgaaaaaagcgtttttcctaacttttccgccagaaaaaagcctgtaaagatgcaaaaacaccgcactttcgtgcggtgttttctgtgttgcatctttcatcaacacatcttggtccgagtagtgcgactcgaacgcacgacatccagctcccaaagctggcgcgctaccaactgcgctatacccggatattcgatttttctgcatgataccatgcggagaaggaaaaagcaagtttttcgtgtctgtgggcagtgctgtggtcaagcccggttttgcggggggatcttcaggcgggggatttccgccgcaggctactgtcccaaggacttccaggctttcactttttggggaatggataggctctctatcctcccaaatcacgcgtgctgccaactacgctacatttggtcatagatatttctcccgcccgggggcgttcttccccacatacgtgcggcaatatactctgcgatccgccgcgttggcactctggcaccatcttttactggatcggggacagcacgatgggttcattttatacctctctattttacctgtttctccgccaaagtcaagtctattcgcttccggccggtatgtcggaaaggccgtccggaggctatggggcctccggacggcttgaccaggtctcttcacttggaaacgcagagtcgattgttctccacggtaagcttggcggtgtcaccggccttgagggtgccgtccagcatcttctcggccacggcgtcttccaccttgctctggatggcccggcgcaggggacgggccccgtacttgggatcaaagccctccttagccagctctgccacagcctcgtcgctggcatccaggtggatgcccatggtctccatccgggcggagacggtcttcagcatccgccgggccacttcccggatgtcctcctccgtcagggggcggaatacgatgatatcgtcgatccggtttaggaactccgggcggaaggtctgacgcagctccgccatcacctgctcccgggcggtctcgaacttcttttcagcgtcaggatcggagtcccgctcctcggcggaaaagcccagcttgctgcccatggcagtgaggctgcgggcaccgatgttgctggtcatgacgatgacggtgttcttgaagtccaccgtcctgccctgagagtcggtgatccggccgtcatccagaagctgcagcaggatgttccacacatcctcgtgggccttttcgatctcgtcaaacagtaccacggagtagggcttgcgccgcaccttctccgtcagctgaccgccctcctcgtggcccacatagcccggcggggagccaatcagacgggacactgtgtgccgctccatatactcagacatatcgatccggatcatggcgttctcatcgccgaacatggcctctgccagggacttgcacagctccgtctttcccacgccggtggggcccaggaacaggaaggagccgatggggcgcttcggatccttcagacccacacggccccgacggatggcccgggccacggcctttacggcttcgtcctgacccactacccgctcgtggagggtgtcctccatgtgcagcaggcgggtgccctcatcctccgtcagacgggtgacggggataccggtccagccggccaccacggcggcaatgtcgtcagcgttcaccgggcggtgctgggtgttgttcttgcggcgcttctcccgctccatctccacctgctcctggtagtccttctcaatgtcccgcagcttggcggcggtctcatagtcctgcttctcgatagcagcctccttgtccttggccagggcggcgatcttctcctccaggctcttcagctccggggagatctcctccgtctccatccgcacccggctggcagcctcgtccatcaggtcgatggccttgtccggcaggaaccggtcgttgatataccgggcggagagcttcacggcggcctccagggcctcgtcggtgatctggaggctgtggtgcttctcgtacttctcccgcaggcccttcaggatctccagagacgcctcctggctgggctcacccacctgcaccggctggaaccggcgctccagggcggcgtccttctcgatatacttccggtactcgttcagggtggtggcgccgatcacctggatctcgccccggcctagagccggcttgatgatgttggcggcgtccacggcgccctcggcgctgccggcgcccacgatggtatggagctcgtcgatgaagaggatcacattgccggacttcctgacctcctccagcagcttcttaatccgctcctcaaactcaccccggtacttggtgcccgccaccatgccgctgaggtccagggacaaaaggcgcttgtccagcatctcgtcgggtacgtcgcccataacgatcttccgggccagaccctcagcgatggcggttttgcccacaccgggctcaccgatcaggcaggggttgttcttggtgcggcgggagagaatctggatcacccgctggatctccccgtcccggccgatgaccgggtccagcttgccggcccgagcgtcggcggtcaggtcccgggtgaactccttcagggtcttgttcttgccgttatcctcctttgcggggctggtgccggagcggccgggatcggcggcctgactccggggcatctcacccagcttctgcatcagggctgtgtacaggtgacgggcatccacgccagcggtgcgcaggatacggacggccatattgttgccttcccgcaggatgcccgccagcaggtgctccgtgcccacgtagttgtagccgccccgcatggagtcctccatggccagctccaccacccgcttggcgcggggggtgaggccctgggcgggattgctgccgggcagaccggcacccacgctcttcttgatgatctccacgatcatgtcatcggtgaggcccgcctccgtcagaacggtgtgggccacgccctcctcttcccggatcaggcccagcagcaggtgctccgtgcccacgtagccgtggcccagctcaccggctgcctcctgggaaagccgcagggcctcctccgccctgggcgaaaatttgttctcattcatagtgtcttaccttcctttccatgggaaagtcccgtttacttgttttccttctgctccttgtgagcggcctccagagacctgatctggtcccgcagctccgccgcccgctcaaagttctcctggtgcacagccttcttcatctccagcttcagcgcgttcatctggcgcagataggcaaagcggctctggtcctcctggcctaccaggtcgtccttcttttcctgctttgcctcctgctgctggacaggagaggcgctcagggccggcatctcggcgaagaagtcgtcaaaggggtcctccagcatcttcattctccgccccagcaggctgggcatgggagagaagaaatcgtcgaagaaatcgtttccaaagaggctgttcccgaagaagctttgcatcatccgctggctctgggcacccagccgctgggtatagcccagcttttccgcgcagtcgctgcacaggtgcttctcttccacatggccgttcacgttgctccgatacacaaaggtaacttcattcttaccacaattttcgcatttcataaatcaattcctcctatcatctggaaactgtgcgtgcttattgaaacatttttccccgctgcccgggtcccggctacacctgcaggatcagcacctgcttcatgatgtccgcccggacggtgtcccggctctcccgcgggaccgcggccagggccttgtcgccgacggcggccagaatgctccgacctgcgttctcctccagggcgccggcctggaccagattgttcaggatggcccgagcggaggccaggtccacctggctgcccagggtgttgatgacctgcatcagcagcgtctggcggtctacccggacccgggtgatccggatgtagccattgccgccccggcggctctccacgatataaccccgctccggggaaaagcgggtggacatcacgtagttgatctggctgggtacgcaattgaagcgctgggccaggtcattgcgctggacctccagcacaccaccgtccgtctcctccaaactctcctgcaggaagctggcaatcaaatcggaaatccccacggatgattcctccctttccaaagaacgccttgtctctttgactttgactttctttaaccttttgttctgtgtttagtataacacgcccgagcaaaatgtcaagagctgaattttgactttctttgacctatttgaaaacaatttatgaacagttagtcttgacaaacgtcatttttggacgctttcccgtattttttcgaaaatttaaccatagaatttgaacggctggtacttgctttttttaatttgtatgctacaataggggtacaattctgatggaggtgcttcccatggcttacaaaatcacttctgcctgcgtgagctgtggctcctgcgcggacgcttgccccgccggtgctatcagccagggtgatgaccagtacgtcatcgatgctgccgcttgcctggactgcggttcctgcagcgacacctgccccaacggcgccatcgtccccgaggagtaatcgaggatacataaaaggtccgcgagccaaagctcgcggacctttttgtcgtttcggcaactgtaagaaatctgtaagagatttctccatagagttgtaagaaattggtgttatcctgccggtgttccccgctggagtgaagaaagaggccctttactcccgtaatattggggacagccgatttgaaaggagacacacgatgaaacacgcttggaagaagctgctggcagcagcggtgctgccctgtctgctggcgggatgcggtgccctgggagggccggaatctgaggtcccctccatggaccacttgcttggcttgacccaggaacagcggctggaggactacgactacctggtccagacactgggggacagctatctctgcatgggtgtccgagaccgggacaacccggaggacccgtcggcggccatcttccaggcataccgggagatgatccaggaaagcgacagcgacgaggtattctattccgctgtttacagcacactgttccgcctggggacgtacggccacctctggatcgtggagccggatatgtaccgcgcctactgtgaggcctatgaggacggcggcatccaggaccgggagcactggcgggaggtgctgacggacccggtgaccgtccggggctatgaaagactccagacgctgctggatgcctacggcgaagaggacggcacggtcaattcagccgattcggaggagcctgccgcgaacctccacaccctgctcctgcccggcggagacgtggggtatgtgaagatcgacagcttcccggcggaatatgaggacagctacgccacagaccgggcggccctgacggacttctaccgccaggcggcggactgcacggatctcatcatcgacctgacggacaactccggcggaagcgaggtctactggcagcagctgctggcggcgcccctgacggaccgtcccctctcctgcaccaactatgccctgctggcggagagcggcaacaaccgcccctatatccaggaggtgttctccccggaggagctgcaccccatcgcggacctgccggatctgcccaagctggagcgggacggaatccaggccgccacccactttgtggagagcaccctctctgtggagccagcggcagagcgggcccccttccacggccgcatctgggtgctggtggggccagcggtctactccgccagcgagtccttcgccgtgttctgccaggagacaggcttcgccaccctggtgggcagtcccaccggcggcgacggcatcggggctctggatccagtcttcctgcagctgcccaacagcggcatcctggtgcagttcaccatgatgttcggcctgaacggtgacggctccagcagtgaggaaacgggcaccacgccggacattctctcccctgccggggaaccggctctggtgacggccctgcgggccatggagggagtcgcatgaccgaccactgtctggaggaaagccgcggcctttccggaggaacgccacaggggctgcccgcctgccctcccccgtccgctgaatgcctggagcggtcccggggcgggctctccctcaatcatctgaaggccgtggcggtggcggccatggtgatcgaccatatcgccttcgcctttgtccccgacggcaccctgttggcgattctcctgcattccatcggaaaaatcaccggccccaccatgttctttgccgccgtggagggctgtcaccacaccagaaacctcaaccggtatctgctccgcctggctgttttcgcgctggtcagctggtttccctttctgtacttccacttcggcggcgatctggccgccatccagctgatgcgccccaatgtcatctataccatttttctgggcgttctggcggtccgcatccgcaggagcccgcgcctctgctctgcctggaaggtcctgctgattttgctcctgttcatcctgtctgtcccggcggactggggctacacaggcgtggtgattatcctggtgttcgactattattatggcagttggaagcaccaggcgtttgcctactgcatggtggtcatgctggacatgggggtgctctccctgctgatccacccgtttttcggactgttttacgaccatgtcttccagatcgactgggagctctacgcctactccgtcgagtacgtgggggcgtttctgccgctgctgctcctctcccgctacacaggccggcacggaaccagcggcggtttttccaagtggttcttttatatgttctaccccctccacctgctggtcctgggctggctccgggccgtgctgtaagtctcggccctcacgacccgcaggggcctggaccggcgggcgatgagagcatcggcctgctgcagaaacttccatcacccaccgggccagcggcagcaaaaagagaaggagagaacatgcagtggccgctccgcgccgtccgcacgatccgccacggggcagcaactacaggaatcgcaaaaggcccaaaggccagaccaaatcggcgcttgcaccgatcgtcgcgcggagggccactgcaccggagcgcgcccaagcggccttttcttttgaaccgtgccccccattgcaagaatgatgatcttccattataatatgaatatagacatcatccaatggggggatcgacttgcagcactgggaactcctctgccccggcggactctccttcgtctgcgatgacggcctgttccagcccagtaccgactcctttctgctgggcagctttccccggctgaagccggggcttcgggtgtgcgacctgggcagcggcaccggactgctgggccttctgctgttccagcgccagcgggcactgtccgtcaccggtgtggagctgctgctggacgccgtccgcttggcggagcaggccgccgcccggaacggcctggcagaccgcctgatcttccgccggggagacctacgaaagatccgcggcctgctgcccgccggtggctttgacttggtggtgtgcaacccccctactatcccgccgggtccggcaggctgccggagactgaggccctccgggctgcccggtccgagactggctgcaccctggaggatatctgcaccgcagcagcctggctgctgcggtggggcgggagcttctgcctggtccacaagccggagcggctggcggacctgtgctgcgccctccgggcccggggactggagcccaagcggctgcgcctcgtctgccgccgggcgggggacgccccttccctgctgctgttggaggcccgccggggcggacggcccgggctggacatcgccgcccccctctgcctggaggacgggaccggccgccccacggcggagctggacaacgcctatttccgaacaaaggagacgaacgcatgagcggtacgctgtatctggtggccacgcccatcggcaacctgggggacttctctccccgggcagcggagacgctgggagccgtggacttcatcgccgcggaggacacccgggtctctgtgaagctgttgaatcactttcagatcaaaaagcccctggtgagctaccacgaacacaaccatgccgctgcgggccaggccatcctgcagcggctgctggctggggagtcctgcgctctggtgacggacgccggtacaccggccatctccgatcccggagaggatctggtgcggctatgtgccgaaaatggggtggaggtgctctccatccccggctgctgcgcggcagtgaatgccctggcggtcagcggcctgcccacggggcggttcacctttgagggcttcatcaccgtcaacaagaaaagccgccgggaacggctggactctctgaaaaacgaggagcggaccatgatcttccacgaggcgccccacaagctgcgcgccacgctggaggacctgcgggagaccttcggcccggaccggcgggtggccctgtgccgggagctgacgaagctccacgaggagactgtgcgcaccaccctgggagaagcggcggcctattaccaggaaaacacccccaagggagaatacgtgctggtggtggcgggcagcccgccccgggagaccgccgccgtcacgctggaggaggggacagagcaagtcctgcggctggtggcccagggaatccggctgaaagatgccgcccgggaggtatcggcccacacgggtctttccaaaaacgagctgtacgccgcggccctggagcggtcatgacccgcgcaggacatgcagcgcagaagacgcccatgcggagaactccgcatgggcgtcatgttttcagcgcacagggcgctcacagctctttcaattctttcaggcacttggggcagatattcttccccttgaataccgtgatgtctttggtggcgtcgcagaaaacgcagctgggcttgtattttttcagaatgacggacgagccttccacatagatttccaatgcatccttctcgccgatatccagcgtccggcgcatctcgatagggagcacgatccgtcccagttcatccacctttctgacaattcccgttgatttcacgatgtatctcctttttcagcaatatgtcctaactatccatttataagaacatatcacagacggtcgcattttgtcaatttgattccaaaaataaagtgaatttaccaatttgcttttttgaaatctcagttgtcctctctatatttttgtgaggcaactgggtatccgtcacaaacacagggggaatgacaatggcaatgacctggatctggaccgggatggtggtgctgtccctggtcttcggcctgttcaccgggaatctggacgccgtggccgacgcagctatggacggcgccgcctccgccgtggagctcagtgtctccatggccggcattctgtgcctgtggagcggcgtcatggaaatcatgaatgtctgcggcctctctgccggattggcccgggccttccggcccattctgcggcgactgatgccccaggccagccgggatgaaaaaacgttggcggcactctccgccaacgtgtccgccaatctgctgggactgggcaacgccgccacgcccctcgggatccaggcggcccgacggatggcccgcggctgcagcggcaccgccagcgacgaactgtgcctgctggtggtgctgaataccgcttccatccagctgctgcccgccaccatcgcctccgtccgcagcgccagtggagcccagtctcccttcgacatcctgccggcggtgtggctggcctcggccctgtcggtggtggttggcgttctgacggccaaattcctggccgccgtggggaggtgccggcgttgaatctcagttctctggtgatccccgtactgctggccggggtggccctctacggcatggggaagcgggtggatgtctacggcgccctgacccacggggccgaagaggggctcacggtcctgctgaaggtcctgcctgccctggtgggactgctgaccgccgtggccatgttccgggcttccggcgccctggagtggctcacgggcctctgcgccccggcgctggagtttctgggcattccgccggagaccacgccgctgatgctggtgcgccccgtatccggcagcggcgccctggcagtcggctcggacctcatcgccacctacggccccgacagctacatcggccgggtggccgccgtgatgctgggcagcacggaaaccacattctacaccatcgccgtgtacttcggctctgccgggatcatccgcacccggcacacggtcccggcagccctggccgcggacctgacggggtttctggcctccgccttcgcggtgcggctgttcttcggcgcctgatggggcggcgtcccgcgccgtcaagctgcgctgagataaggctccagcacagcggcgccgccgtaggcggaggcgaactcaccgtccaccagataccgcacctcttccactgcccgcagggacagcagggagtccgccagtgcccggagggccagggacagatccgcctcctccggcagacccggcagagccgccgtgggcaggtctacatagcacgtgctctcttccagccggacggaagtcacctggaatccctccggaatggcggagagccagtccttttcctccgtcccctccagcagggccttgaccacggccccggcctgcgtgtccccctcgtacaggtccagtgtcatctccaccggcgtcaggccgccggtctcatccagaaagtacagggtggcgttcagcgtgtcgatcacatcctcgttgctggaaaacaggacatccctggctgtgaagatctgccggtcccggtaggccagcggctggccccggaccgtcacgctgacagcggagatctccggcagctgggtcagcgtcagggtgatggcatagtctgccaaggccagcgccacgccggagagcagccggtagcgggaggagaggtccaccttggcccgggtaccatccagctccagggacagcagggtagtctcctctggaatggcgctggtgagggcggcgtcctccggtcccgccagcagctccgtcaccagatactccgccagctcccgggtgtcccgcacctcgcccgactcgatgtacagcggctccgcccgcagggcatcgccgccaggggcgtcggacagatccgcctccaggaaatagaggtcgtatgtctcgccctcgccggaaatgcggggctgtccccagccgaaggccgccagaagggcggcgcacagcagcacggcaatccatcgctttttcatgtctggccgcctccttcccgccagggccagcggacggtgaaaactgcgccgcctccaggacggttggccgcctccacagtgccgccccgcttttccaccgtgtccctgacgatggccaatcccagacccgtgccgccggcagcgcgggaccgtgccttgtccacccgatagaaccgctcaaagatccggggcaggtcctcttccgggatgccggcgccgttgtcctccaccgtcagcaccacctgatccccctcccgaaacagggagacctggaccgtgctgcccggcggcgtgtacttcacggcgttgtccgtcagattatagatgatctggtggatctcatcccgggtggccagcatcgtacaggtcccctccgcccgataggtcagttccgttcccttctcctgggccaccaggctcatcatccgcatcacctgctccagcaccggcagcgcgtccactaccaccggccgctccagcacgttgctgtccagccgggtcaggcggagcagatcctctgtgatacgggagaggcgctccgcctcctgcccgatgtctgtgacaaattcccgggccgtctcccggtcgatgttctccgtctggaggatggagtccgtcagcagccggatggccgccaggggcgttttcagctcgtgggaggcgtcggacacaaagcggcggcgggcgttctccgtagtctggaggcggtccgtcaagctgttgaactcctgggccagctgggcgatctcgtcgcgtccgggcacctccgcccggtggctgtaagcgccctcccgcacctcccggatggcggtgagcagctggccgatcttccgggtcagcgcccgggacagcaggccgctgagacacagcaccaccaccgcgatgccggcggagagccgcaatagattgccctgcagcccctccagcagagcggcctgctccgtgtcatactcgtatgcgtatacggcgccgatgatctggttctggtacagcaccggcgaggccgcccggctgcggaaggccccgtcccggtagctgctggagaacacgtcgttccccagcagggcctggacgatctctgtgtagaagctgtactcccccagggcgtcgttggtctcccgggtatcgtagaggaccttgcccgcactgtccgtcaccaggatgcggctgaggcccgtctcctccaccaccgccatggcctgggacacattctcctcggtcagccggtccaggccggacagggagtagaccatcacggacacgctgctctggagcgtggttgccttggagcggaacaccagatcctgcgatacccgcagcggataggtgttcagcagcagcagcacgcccgcgataatcaggatatagctcaggccgaacttgaactgcaggctgtcccagatcctgcccttatcctttgaaatagtatccaactccccacttggtcataatatactccggctccgccgggttcttctccagcttctcccgcaggcggcggatgtggacatccaccgtccggtagtccccggcgtaggcatagccccacaccacgttcatcagattctcccggctgtacacccgccggggattgcgcatcagcagctcgatcagatcgtactccttggcggtcagatccacggtctttccatcccggatggccacccgctcctccgtgttcagggacaagtcccccgcggtcaggacggcgccccggttccgctgcgtgccggcggcccgccgcagcagcgcccgaacccgggccttcagctccagaatgttgaagggttttgtaacatagtcatccgctccgcactcaaagcccatcagcttgtccgcgtcctcgctcttggcggtgagcatgatgatgggcacattggagaactcccggatccgcatacatgcctcctgcccgtccagctccggcatcatcacatccagaatgatgagatcgaagcggccgttgcgggccagctccacggcggaggcaccgtcataggcacactccacctcgtacccctcgttctccagattgaatttcacgcctttgaccagcagcttttcgtcatcaaccaccagaatcctcatttgtcacctctcctttgccgttgtccacagtgacgcggtcctccagctcggcgaatttcgcctctccgatcccgctcacctccatgatctcctcaatgctcccgaaggggccgttggcctcccggtacgcgatgatccggcgggccaggctctccccgatgccgggcagcgtgtccagctcctccgccgtggcggtgttcagatccaccggcgggaagtccggggcgatctcctcccgggggacctccgcctctgtctcgatgactacgcccgggacgcgatcctgccgatcccgaagagacaggcccgccagggcgcacaggaacaccgccgtcaaccccagcagaatgatctcactttttgtcggccttccccgtccactcactgttgaactcccacccgttttttgatatactatgaattgaaatgtcgaaccgcggcgcttttcgccgccgctgccgcgcgatgcaagttgattataccacagatggtaggagtttgatatgaaaacacaccgctttttctctgtttttttgctgctgatcctggcggtctccctgctgacaggtcctgcctccgccgcagaggtgcctgaccccgccatccaggccaaggctgccctgctggtggacgccaacaccggccgcatggtctatggaaagaacgagcacgaggagctctatcccgccagtctcaccaagatcatgaccgctctgctgacgctggaggcagtggacagcgggcagctgtccatggaccagccaatcactgttacggagagcgccctggaggggctggcggcggatggcagcaccgccggcatccgggccggggaggtgctgacggtggagcagctgctggagtgtatgctgatcgtctccgccaacgaggcgtgcaacattctggcggagcaggtcagcggcagcgtggacgccttcgtgggcgccatgaatgaaaaggctgcggctctggggtgtgagaacacccacttcgtcaacaccaccggcctgcatgacagccagcactacacctccgcctgggacttgtacctcatcacagcggaggccctgaagcatgacgacttcctgcggatctgcgatatgaagagcgccaccatccccgccaccaatctcagcgaggagcgggtgctccactccaccaactacctgatctccaactggcgggccttgggatatctggacagccgggcccacggcgtcaagaccggctccacctccgatgccggccactgcctggtatccactgccgcggagggcagcctctccttcatcagcgtggtgctgggggccgaatccgtgaccttgcccagcggcggcacccaggtccagagcttttccgagacctcccgtctcttcgactggggttttgagaacttctcctatcagacggtgctggaggaggctgagctggtgaaggaggtcagcgtggcgctgtccaaggtggaccatgtgtccgtccatccggcggcggatgtggagctgttgctgcccaagggcactgatcccgcctctctggagcggacgctggacctggagagtcctgtggacgctccggtcaccgaggggcaggtgcttggcactctctccctctctctggagggagaggtgttgaccacggtggacctgctggcctcccatgatgtggaggcctccggcctgctgctgttttggcggaacgtgcggaacttcttcagttccaccgcggtgaaggtggttggcatcgcgttgctggtgctggcggcggcgctgatcgtctggaagctgacggtaggccgccggcgctaccggtacggccgtagcgtaccccgccgccgcgggggcggctaccggggccggaggcggcattgacacaaaagggccctggggcagcatccccagggcctttttacagagagaggcacaaagcgcagctgttgagatacggaatcctcccgctctgctcttcactctttccagaaaatccggaatagaattcaggggcgcacggcgtgcgcccctgattctagatcccttattgtcacagataccgcaccagctcttccaggggcttgcggtccgtgtgcaggcgggagggatgggcgccctccgccggatagcccataggcagcagggcgatgggtgtcagccccgccagctccgggaatgcggcgtggagcttctccgggtcgaacatgcccacataggtggtgccgaggcccaggtccgcggcctggagcatcatctgggtgacggcgatggccgcgtcaatctcgccgtggttcttgccgtcgtcctcccgcttccaggcggcctccgggtcgtatgccaccagcagcatcaccggcggatggaagtgagcgccggtgcagccgtccaccttttccagcgcctccgagctctggagcacaaagatgcgctggggctggaggttatgggcagtgggggcattgcggccggcctccagcacggcggagagcttctccgcctccacggggcggtcgctgaatttccgcagagaatagcgctccgcggccagtttcgcaaaatccatggggatgcttcctttctgatgtagagatacctgattttagcacatccccgcggccgccgcaactgtttttctcacatcccctggttgggcatccagccgctgcggaggacctcgtcgcagatgtcccggcagcgggtgtcgtagaactcgatgaatttcagggaataaatgtccgagacgatgtagcggtcccggccctcctggtagatggtcatatagtcgttgcccacatcgtacagaatcccctcccaggaggtggtgctctgggtgcccaccaggaaggtggccaccacgtagttgcccacgtttttcttcagcatggccttcaaagatccccggtaggcttcctccatggagatggggtccgtgatgacctcgctgggcaggtggttccgcatgtccagggaccccatagactggccgccctgctcctccgcggcgttcaggcggtccatagggcggccggcactggtgacggtgcggccgggcgcctccggcatgggcgggtcggcgggcatgggtgtgacttcaccggaccagtccgtcattctgggcgcgacctgcgccacaggaggcgccccgtttccgccgttgtagatattctgatagtgtgccatttccaacacctctcaagtctgataatacgcgtctgtgggattatagaagcagtggtcgccgatccgggtctgccagtatcccaccttcgagggaaagaaggaccggcaggtggggccgaaggggttgtaaaaccacagggaatccgccacatccggcaggcggttgcccgcgatggcccagtcggcgatgtcatagtggatctgttcgggtctcatgttgtagatattctgggggttgtaggcgccgccctccgtctcgctggcgcagacgaactgatagggctgaaagatgatattgcggatgctgccctgcccgacccgggcatactccccgcccttggcgtggacccggttcattacaacaccggccaccgccttcatgccgtcttcaccctctccgcccgcctcgcactggatcaggcgcgccagcagctcccggtcggaataagccattggtcgatcactcctctgtcggggcctgccatacgtaccaaacgccggtccggcagaccgcctggcccggacgtttcaccctcaggatatgcacagggactgcagaaggtgtcagcggcagcctcccggtcccgtgaagggggagtctcccagcgaaaaagtcggtctcgattttttccggatggaccggcccagccggaatgtggtatactggattctcagcgaacgagtcaggcggccgcggcatggaaaatacgcctcaagatcccgcacatctgcggagggagttccagccgtgccggaaccgattcaccgcctttggcggcgagacgcggcaggacctgctgcgcgtcctgttgtctcccccgcctgcaggttctgcgggagacaggcgtgataaaagcccgaaaagaagcgactcgcgtcttctactatctggccctgcaggacagtgggatcgaaaacgtagcgcgcctgttcgcagacattctgcagatcctgagaaacgctccggacaagagcggcgaggattgactgcggctatcacaggaggaatacagttatggatttgttcgaggccatggagcaccggcatgcggtccgctcctacgaggaccggcccatcgcgccggaggcgagagaagcactgctggcgtgcatcgcccagtgcaaccgggagagcgggcttcacatccagcttgttctggatgagcccagaggattcggagggcttccggcccactacgggaagttctccggcgtaaaaaactacatcgcgctgatcggaaagaagtccccgaacctggaggaagcctgcgggtactacggggagaagatcgtactgcgggcccagcagctgggtctcaacacctgctgggtcgccatgacgtacagcaaggtcaagaccgcctttcagatcgccccgggcgagaagctctgcctggtgatcgcggtgggccacggcaccacccagggcgccggacacccggtcaagcagccggaagaggtgtccaaggcggattcccctgtgccggactggttccagcggggcgtgcgggcggcgctgctggcgcccacagccatgaaccagcagaaatttaccttcacgcttcaaggcggcagcgtggccgcgaaagccggaaccggcttttacaccaaggtggacctgggcattgccaaataccattttgaaatcggggcggggaccgcgcagttccgctgggctccctgaccgggagccggtcttccggcagcctccgggcctcccgcccctgtcaggaggattttgatgaatatcgaaaccatacaagccccgcggggcgccatcgcagtgctctccggcgggaaggtgcagatcacggacgcgggtgcggccctggacctggccatgtccgtccggtatgagaccggcgcgtccaggctggccatcgacaagcgcctggtgtgcagcgactttttcattctcagcaccggcgtggcgggagacatcctgcagaagctgatgaactaccggttcaaggccgccatttacggcgactactcccactacgccagcaagccgctgcgggactttatccgcgagtccaatcatggcaaagacttctttttcgtgtccaccatgaaggaggccgtccagcggctgacagacgcggagtgagcagccccgcggcggcgcaaaagggacggcagcgatttcgctgccgtccctttggttcttctgcgtgttcggttttccgggcgcttaggctttcgccccccgctgctccgcaatggcctgacggaacatctcctccgtctggcggatggactcctccagagagtactgtctggcgtgttcggcatagcggcgctccattgcctgccgctcctccgggtgctcgatccaccagtcgatccgctgggccagcgcgtctgtgtccccggccgggaacaggctccgctcatccagggcgaactggggcgtggcggaccggggggaatcggcgatcaccggcaccaagccgcaggcaaatgcctccatacagctcatagcctcgatctccgcgtcggaggtgtggacgtacagatccgccatgtggaggatctccagcaggcgggcaggctcatagaactccatgacgatgggattggggagcttctccgccagacggcggtattttttctccagcggaccctttcccgccaggatcacctggatctcccgggcgtggcgggacttggcgcaggcgtcgatcagctcatcctgacgcttttccccggcgtagcggcccaccatcagcacattgaagaggccctgcatccagggttccttttcccgcttgccgtagatgtactccgggctgatgccgttggagatcacgtggagccgggcggtgtagccgtgttggcggagctggttcgcaatcatattgctggggcagtggatgtgggtgaaccggttgaagaacgtatcccggaagcggttgtatacaaagtcgttgacgcgcctgctgttgcccatgtgcagggtgaaggtgatgttctccggctggcagtggaaggccgccgtgtgagggatgcccagcttttccacatgcttcaggcccatgatgcccaggggcgacggcatcatgaaatgcaccacgtccgcccaggccgccgccttttcaaacacatggcggttggggatggccagccgcatcccctggctggtgatgagatgctccaccactggaaagaacctcatctgccgcacggcgtacttgtagtccgcgggcttgccggtggcgatgacccgcacctcgttgccgtggttcttcagcgcctgggcaaaacgccgtgcgctgatggtggtgccgttgttcgcgtcgtcaaactggtcgatgaccaaaacgatcttcataaacgtctgaaccgtctttctttggtttggcggcgcttccgccgctaacggtttagtttaccatgtttttcatcgcttgtccagggaatttcgtcgcctgcgggatctctgaacggactctgaacaacaggccccgcggcagatgccgcagggcctgtctcaggcttatttctgtttggccagggcggactccagcccgcaggcgaactggtctgggcaggaggtgctcttggcaccgcagcggatgcccttcaaacggtggatcgcctcctgggcaggcatccccaccaccagggcggaaatcccctggaggttgccgctgcagccgcccaggacctccatcttctggatgatgccggcgtcatccacctccacgcgcatctcctgggagcagacgccccggggacggaacgtatacgtcatggtcgaaatctcctcttttcatgatattgcccgtttaggatatcacatcccgccgggaatggcaagaggcggcacaatttgaagaagggggggaaattctccgtcatttcagcggaacatgcggcggttcctttccgttccccaactgtcagggtccattcctgccgtttcggatttcaggcaaagcgcgatgcaagcacagccatgatagataccagcagcaggccgctgcacaaagccagtattaccaacattgcttttctgagctttctatttgccttgacggctctgtctatccggtccgaaaagatcagaaggaaaaaagcaggaatcagaaaccaccagtatatctgcatgtaatttgcctcctccccaatccgccgaatgggtcttgcccgtccgggaaacctgcattttttattttatcagatcatctgatccggatcaaggccgcctggcgaaggcggaagcgtttgcgtcatcatcagttatctcgaaaagagactgcaggcgggttaaagaatcccggcttgacaatatcgatattcgatgatatagtggtctcaaagcaataacgatattcgataataggaggcggcagcgccatggcccggggaaaatttcagaccctgaccgagcagatgttctacattctcctgtgcctgcggcaggagcggtgcggcgccgacgtgatggcctgggtcgcagaggccacgggcagccgggtggcggtgggcccggggacgctgtacaacctgctggagcagtttttgcaggctgggtacatccgggagacgaaggtggagggccggaagcggagctatgtgctcacccccactgggcgggaagccctggaggcagaggcccggcggctgcggcagctgacggcggattatgaacggctgatggaatcggaaggaggcgccccatgaagcacacaaagcgggagtggatgcccctgtacagctttttggaccggaagcgggtcacagaccatctggcagacatggccgccaggggctggatgctggaccggctggggacctggtcctggcactaccggcggacagagccgaagcagctccggttcgccgtcacctttttcgccggggccgggcggttctctcccgctccggcggcggggctggacacctttcaggactactgcgcccaagccgggtggcaccgggcggccagctccgaccaggtacaagtgttttacagcgaggatccggcggccgttcccatcgacaccgacccggcggcggagctggagaacatccgacggagcattggaaagcccatgatacgcaattacctggcgctgctgctcctctgtctgctggaagtggcgtttcaatgctaccagatttggacggatcccgtggacaccctggccagtcccactgccctactggcggccacagcctacctgcccctgctggtgctgacgctggcaagcctgctgctctaccgccgctggcagtggcgggccgaggccgccgtcgaggcggggctgcccctgccggacctgcggagtgcccggggacttggcattctggtgttgatgtggtccggactcctgattgcaggcttgtttgcctccataagccggtccaccgggatggtcatactgaccatcgggatggtattgtttttcgcactggtctattttctggccaacgccgcccggaaggctctccaacggctgcggtgcccgccctgggccaacctcctggtaatcgtaggaatctgcatcgccatgtttgcgggcgggacaacaggtctgttcgccctcatgatacgcaatgccggttccggctggttggaggaccatccgccggtggagacctacaccgcccacggcatgacttggtccgtctacgccgatcccatcccctgcgggtggaggacctgatcgatatcgactatgacggctggtccacggaggcggatgtggagtggtccccttggccgcccacggggagtaccggcaggacgcccggctgggggacggagacctgccggagctgcgctatgagatcgtcacggtgaagcttcctttcctctatggcctgtgcaagcgtgatttcatccagtgggtggagcgggacaacgatcagctgcccatggagtattgggaggagtacctcaccgtgactgccgccccctggggtgcggaggaggttttccagcggtactccggtgcagagccggtgaaccaattcctgctgtgctggccggaccggatggcagaggtcaagctgccctgggactggcgcttgacggcagaccagatggctgtcatcggagaaaagctcctgtacgcctgacaacagccgggagaggataccctctcccggctggttttctgtctgttttcttacgctctccggtccttccgctgctccagcaccaggcggtcggcgatcatggcgatgaactcgctgttggtgggcttgcccttggcattggagacggtgtagccgaaatacttctgcagcgtctccagatcgccccggtcccaggccacctcgatggcgtggcggatggcccgctccacgcgggagggcgtggtggaaaaccgcttggccacctccggatacagcaccttggtgacggcgttgatcacatccatgtcgtccacggcgatcatgatggcctcccgcaggtactgatagcccttgatgtgggcgggcacaccgatctcatggataacagaggtcaccagattcttcagctccgccgggtgttcctccaccggggcaccccggctgaacagcgcccgcatccgatccagcagggcgttctcctccacgggctttgtcaaaaagtagctggctcccagatccacagcctccgacaccacgctgtcgctgcagaaggcggagattaggataaccttggggaccttcccctcctgctcccgcagctgcttgagtacgccgaagccgtccagccccggcaggaccacatccatcagaatcaggtccggcgcttcctcacgcgccaggcgcagggcctccgtcccgtctcccacagaccccaccaccgaaaactcctctgtctcgtctatgatcttccgcacaagggtgcggaattcctcattggcatctgccagcaatacagttcttctgatgtccatgtcttcccctgtcctctttccacaattttcgtttaccaggcacaaatgcttcagagcaggccccctctccctgccggaaaaaagtgggcgctcctgtttacgacggattcatgaagcttcaaatcgcgttttctataaagtagcataaacggacacgatttgcaacaagaaactgtaaataacttccaagaatcattcgacactttctgcgccgcgcctcctaactcattgtgccgcaaggggtgcagagtctcccggcagcagtggcttcccttttggacggggccgtggtacaatggagccatctcaagagaaaggatgagacatgtgacgctgctggaggaattagaagcgtatcgcccctggaatgaccaggaggaacgggaccgggcggaactgctgcggcggctgcggagcggcgaggcgctttacacccgggacaacgctgccgggcacctgacggcctccgcctgggtggtgagcccggacctgacacaggtgctgatggcgtaccacaacctctacgactcctggtcctggctgggcggccacgcggacggggaccgggatctgctggcggtatccatgcgggaagtccgggaggagagcggactcacggcggtgcgtccggtatcgccccacatttactctctggaaatcctcactgtggacggccacgagaagcggggcgcctacgtctcctcccacctgcatctgaatgtgacctacctgctggaggcagacccggcggcccccgtgcgccggaagccggatgagaacagcgctgtggcctggttcggtctggaggaggcggtggccgcctcgtcggagccctggttccgggagcgcatttacaggaagctcaacgccaagctggcgctgttctccggggaacaggggatgtaacacctctgcagctcaggggccatgtgcgtctgcgttgcttgccgcaacggcggttcccctggtagaatgatcccggaaaggaggcaacgcaatgcttgcagagaatttgaaggccctgcggaaggccaagggcctctcccaggaggagctggccgcccgactccatgtggtgcggcagaccgtctccaaatgggaaaaaggccggtccgtgccggacgcggacctgctgatccggctggcggaggagctggacaccacctccgcggctctgctggggccggaggtcccgccagaggcggagcgcggcggaacagcggagcagctggcccgcatcgccgagcagctggcggtgaaaaaccgccgggcccggcggatctggaggatcgtggccggggtgctgatcgcctttgtgatggtcaatttattgttgattctattgaactttgcggcgttccgcagtttccaggcggaggccgaatccactgtccaagcgcaggaactcccgcgcggagagtcgtaaatctgtattgtaaaaaattccggggcggcgggaagcaaaatgcttcccgccgccgctgtctgcctgggagaccatgtcaggccacgggttcttctgagaaatctcccgctgccagcatagtttccaccaaaattccataccctttgcttggatcgttcagcaggacgtgcgtcaccgcaccggcgaattttccgtcttgcaggatcgggctgccggacataccttggacgatgccgcctgtggcggccagaagctccgggtccgtcacagagatcaccaggtcccggccgtctgctgcattctctacaacctgtaaaatttccacatcatattcctgaacggcatcaccctccacattagagaggatggtggcaggaccggcgtggacttccccggcggccgcaaccggcatgggatcgcccagccgctcggtgaattcgccggggtccagcgtgccgaagacgccgctggtggtgttggcgtacagatcacccaaatctgtggccaggtcgaaatccccccgcagctcaccggcctctccgatggcacccttcttcaccgctttcacggtggagggcagaatggatccggaggcaaagggcatcaggagcgccgtgtcggcgtccgtgatcccgtgacccagagcgccgaaggcgccgctttccgggtcgtaatacgtcatggtgccgatgccggccatgctgtcccgaatccaggccccaatgcagtaggcgcccttctcgttctgttccggggaaacagagagcgtcacgctcccgccttcccggcggacctgcaggtcggtggccgtctccccattctcctggagcagggattggaactgctctgaggaggttacggagacgccgccgcatttgacgatgatgtcgccggtctgcaggccgcagtcatccgcgggcgtgccgctctccggcgccttcaccaccatcaccccgcgggcaaagagcttgatgcccaccgtgtggcccacggggaccagcatccgggcggaggtgtcctggtccgcgccgccggccgtcacaccggcagcgcgcgccggcatggccgcgcacaacagcaatgccaagaccagcgccgctccgccccgcagcacgtgtctcgctttttgaaatggtccatacatgaaatcacccctttccgaaacgcggccggcaaatccgctgatctgccggcgagattatcatctgccgcagacggaaaaacacgccttgcaaaatgcggaagcagccccatggcaggctttgactgtgccgccgcggcggcaaaaaaacaggacccgcaggcaaatacccgcaggtcctggaaaaaatcgttcaatcccgcttattgaaaattttgaaaatatcctcgaaagggtcatcctccggctcctccggcttgggcacgtcctcttccttcaggggcatgggctccgccgcggcgctctgctggcccgcggcccccgcctggatgggcggcaccttgggcagctgctccggcaccttgtcaaagccggtggcgatgacggtgacccggatctcgtcgtccagcgtctcgtcgaaggtggcgccgaagatggtgagcgcatcgggatggaccgccgcctggaccaagctggcggcctgttccacctcctccagaccgatgtccatggagccggtgacattgatgagcacgcccttggccccctcgatggaggtctccagcagggggctggaaatggccatcttggcggcctcctcggccttgcccttgccggcggcccgacccacgcccatgtgggccatgccggcgttcttcatgatggcggtgacgtccgcgaagtccaggttgatgaagccggtatcccggatcaggtcggagatggactgcaccgcctggcgcagcacgtcgtccgcgatctcgaaggcgtttgcaaaggtgatcttctggtccgtggcgtgcttcagccgctcgttggggatgatgaccagggagtccaccttgtccttcagctccgcgatgccggcctctgcctgctgcatccgccggcggccctcaaacccgaagggcttggtgaccaccgccacggtgaggatgtccatctccttggcgatctccgccacgatgggggcgccgccagtgccggtaccgccgcccatgccagcagtgatgaacaccatatccgtgtcctccagtgccttggcgatctggttgcggctctcctccgcgctcttgcggcccacctcggggtcggatccggcgccctgaccgtgggtcagcttttcgccgatctggatcttataggtggcgctggatacgttcagcgcctgcttgtcggtattgaccgccacaaagtccacgcccttggtgccgctgcggaccatgcggttgaccacattgttgccgccgccgcccacgccgatgaccttgatattgacaacggtatcgggaccggtctccaatccaaatgccatatagtggtgcctcctactatcgtttgtgtaaaaagggaggatcgtccctttggattcacaatatcctgtatctcataacatttagtttattgtatgacactttcgccctctggtcaagagtccatcgggcttttccctcagatttttgtccggaaaaaggaggggcggcggtccgtcccccctgtctcggcaatcttctgccaaatccgccactctcagtccagcgtgaggatcggcggattcaggtccaggcggatgctgcctgtctggttactctccagcttgctgattcccgcctccaggatctgcagcatccggtcatagtccgcgttgtactccatctccacagaaaagcggccggcgtagtccatggtcagccgggacagatcgtccaggtggatggcatccacccggtccgtcaggcccgcggcgtccagcgccgccagcagcgccagcagactggtctgctgattggcgaactctgtggacagggcgatgtccgtgcccaccgagggggccagcagctcacagccgtcgatcaccgcatagtccccagcttgagacgccggcagctgctccacgatcttgcccttgggactcagcagccaggcgctgccgtcctggatcaccgccaggggtgtaccgcactccgccacatcgatcagcagagtgtccggcagctcccgccggatgcggatgtcctcaatgtcgatgtagggcagttgctccgcgatgctgcgggcggcctcgtacttgttcagcagaaagaggttgtcgcccagctggataccgctggcctcgatcacgtccttttcggtgtaccgctcagtccccgtgacctcgatggtgtccacccggaagaacagcgtcagggccatcaccacggccgcgcagatcaccagcacggacagcagcttatagaggaagccgaagtttcccctcctgcgccgccggttggaatgtctgcgtctggccatgtcgtctctcctacccgttttctgtctcttccacgcgcaccgcgtccgcccccagagcccgcaggtcccgggccaggtcttcgtagccccggtcgatgtggcagatctgggagacacgggtctccccctccgccgccagagccgccacgcacagggccgccccgccccgcagatccgtacaccgcactggcgcgctgtgaagccgctccacacccgtgaccaccgccacccggccggatacccggatgctggcccccatgcggatcagttcgtccacatggcgatagcggttttcaaagatgttctcctcaaataccgtggcgccccggctgcgcagcagtgccgccatcagcaccgcctgcgcgtccgttggaaagccggggtagggcgccgtctgcaccggccccacggcccgcagccgctcccggcacagagcccggatgcctccgctgtctgccgtgaccgtgcagcccgcctcccgcagggcggcggtgactgtggacaggtgcccctcctccgcgccccggagatagatgtccccgccggcagaggccgccgcgcagaggtaagtagccgccgcgatccgatccggcatgacccggtacgtacagccgtggaggtcctgcccgccctctatggacacggcggagctccccgccccggacacccgagccccgcaggcgttcaggaagttctgcaggtccaccacctccggctcccgggcggcgttggagatcaccgtgacgccctccgccccgcaggcggccagcatcagattctccgtggcccccacggatggcatccgcagcaccacttcccggccccgcagccggtccgcccggcagtggaggaagccgccctcctcccggatctccgcccccaggtcccgcaggcccgcaaggtggaggtcgataggccgggggcccagctcgcacccgccggggtagctcaggtccgcctgcccgcaccgggccaggatcgcccccaggaaaatggcggaggagcgcatctcccgcatgagtacatccgaaatctcacagcggcgcagggcggtggtgtccaccgccagggcatccgcctcccaatgggcgtcgcagcccagatgccgcaggatgcggatggaggcgtccacatcccgcagccgggggcagcccagcagcgccacctgcccccttgccaacagcgtggccgccagaatgggcaggacgctgttcttggccccctggatcgtgacctctccctccaggcggcggccgcctcgcaccgacaaaagctggctcatatccgttcccctccgaatccagaatggttcaacagtccatcctatggccggcggggtttcgtggttactggcagatttccagcacggtttgataaattcgctctgtggcgtcccggattcccagggcggacatggcccgctccatggaggcccggcgcgctccgtcatgaaggatgccgcaggccgcctggaacagcgcctgaccggagcagtccttctccagcagcaccgcggcaccgccggcgttttccaggaccctcgcgtttttttcctggtggttgttggtgacatagggggacggcacgatcagcgccgggacccccagtgccgtcagctcgctgatggtggaggcccccgcccggcagagcaccagatccgccgcccgcatgacggcggccatatcatagatgtactcccgcacctgcagcgccgggtggtccgccaggtccactcccttctcccgcagcagcttcagcagcactggatagccatcctttccggcgccgtggatgtggtggaaaggttccttggccgcctccagcgccaggaagtccgccatctgccggttcatgcccgaggcccccagggacccccagaaggacacaagcaggggccggccgtcttccacgcccaggcggcgcttggcctgtgccttcgtcagatggaagaagtcccgccgcaccggcgtaccggtgacgatcaccttctccgggtggcggtagtgctcccggcaggcctcaaaccccaccatgatccggtccgcgaagggctccagcatctccgtggtgaggccgggcaccatgttggactcgtgaacggccgtggggatccccgccttggcagcggccttcaccatagggaagctggcgtatccccccgttccgatgaccacgtccggccggaactgccgcagaatggcccgggcctctccgggcgcccgaaggaggttccccacagagaccaggttgtgccggatctcccgaggcttgaaggaccggtggaagctggagatgtggacggtgcggaagtcgtatcccgccttggggatcaggtccttctccagtccccgctccgctcccacgaacaaaaattctgtctccgggtccttttcgcgcatcagctgggccagcgcgatagccgggttcacgtgcccagccgtgccgccgcaggtgaagatcaccttcttcaatgatgcttccactttgctgcactccaatcgaaagatatgagataaaagtgaagggagaagagattcggtgtccggcacagccggacattttgagattccgcctttatctcttatcttttatctcttaactcctctgggtcgtactaccccgcctttgtaggcttcatctgccgggataccgacaggacgatgcccatctccgccagctggatggacagcgccgtgccgccatagctgaaaaacggcagggagatgccggtggtgggcagcaggcccgtcaccacgccgatgttcaaaaaggtctgaaggcccaccagggtcatgacgcccaccaccatcaggctgccgaaccggtcccgggcatggagggcgatccagaagccccggagaatcagcgccgcgaacagcagcatgataacggtggcgccaatcaggcccagctcctcgcagacgatggcgaagatgaaatcgttgtgctcctccggcagatagagaaacttctggcggctcttccccaggcccacgccccacagcccgccggagccgatggtgatgaggctctggcgcagctggtaaccggctccctggggatccagccaggggttgtgccacatctcgatgcgggaggcgttgtagccgatcacgcccagcaccagatacagcagcagtccggctgcacccatagccagccccacccatctccagtggatgccgcccaccagcatcatcaccgcgccggcgcccatgatgaggatggcgccggagaggtggggctcgatgcccaccagggctgccaagacaatcagcagcaccgcatagggggcgatgccgtagcggaacgtctgcatacggtcctttttcttggagatgctgtcggcaaaatagatcaccaccgccagctttgcgatctccgagggctggaactgcagcgaagtacctggaatgcccagccagcgggtggcgttgttccgggtaatggccaaggggttgcccggaacaatcaccaggatcagcagaatgacggccagatacagcagcggctttgcaagaccgcggaaccgctgatagttgatcttgccaatgaagagcatggccgccacgcccatgatggcgaacacgccctggcggataaagtaggacatggggttctggccgtccgtctcgtaataggcggaggggaagctggcggacagcagcatcaccaggcccacgccggtcaacagcatcaccaggatgaagaagggcaggtcaatgggccccttggccaattcccggctctcctgctccagctcccgccggcgctgctggcgctcctgccgggccagggcctcttcccgactcatgggtcgccggcgggccgccggggcttttttctgccgtaccatactgcttccctcctctcggggtctgtggatcttgccgcgctccgcagcgggccggcgcagagtgctcagaatcgtccctggacgcccagataggccaggacgcagcccgccagcgtcaccagggagaataccgccaccagcttcgcctcactccagccggagagctccaggtggtggtgcagggggccatcttgaagaaccgcttgccgtgggtcagcttgaagtaacccacctggataatatcggacagcgtctccagaatgtagatgatgcctacggggatcaacaccaggggcatatcgaacacaaaggccagggccgccaccgcgccgcccagaaacaggctgccggtgtcccccatgaacaccttggcagggtggtggttatagacgaagaaggctgccagccctcccgccatagccgccgggaacagagcctggatgccgtaggtgctccagaggacgccggctacggtgaagaacgccatcaccacaaaggtgacgctggcagccagcccgtcgatgccgtcggtcagattcacagcgttgacgcagcccacaatgacgaaggccgcgaagatcagatacacgatccagttgatggtaaagctcatgttcaggaaggggatatacaggtcgttggtcagcaggccctcgtaccgcatcagcaccaggaacaccaccgccgccgccagctgaaggatgaacttctgccgggccgtcagtccctcgttctggtgctggcggaccttgcggtagtcgtccacaaagccgatcaggccgaagatcagggcgaagagatacacgtagaggtgccagaacaccccctccagcatgaagctccaacccaggatgaacacggtgacgcccgcacccaggatgaacatgatgccgcccatggtgggcgtgccggccttggacttgtgccacgtgggtccgtcctcccggatctcctggccggccttcagcttgcgcagctccgggatgagaaatctgccgatgagcagcgtcagcacaaagctgacggccgccgcgatcaaagaaagtgtcatatatccgtctccctctccttcgccgggcacagccccggccctttggtacgttcctgattccagcggttctccggcggccgatcctccgccggatgtcccgccgtatcccattgtccatgcggcgccgcccacggctgaccgccgcatttcacgcggaccgcccgaagtgaattcagccgatttcaagggtttgcctgcggcaaaccgcttgacgccggacgcccggcggtcacttccccgccaagtgctccgccacgatctcccgttcgtccatgtggtgcttctcgtggttcacgccccacaaaatctccgattttgtggggaccccgcatttgactcaaatcgcccgaagtgaattcagccgatttcaagggtttgcctgcggcaaaccgcttgacgccggacgtccggcggttacttccccgtcaagtgctccgccacgatctcccgttcgtccatgtggtgcttctcgtggttcacttcctggtaggtctcgtggcccttgccgcacagggcgatcacatcgccgggctgcgcgtggtccatcgcccagtggatggcctccacccggtcgcagatcacctggtagggggtgccgctgccctccaggcccggcaggatgtcggcgatgatggcctccgggtcctcggtccgggggttgtcggaggtcaccaccacaaagtccgccagctccgccgccacgctgcccataataggccgcttggtccggtcccggtcgccgccgcagccgaacagggccacggtgcgtcccttggcaaagcccttcacggtgcgaagaatattctccagactatccggcgtgtgggagtagtcgatcaggaccgtgtagtcctttcccggtgtggggaccacttccacccgccccttcacatggggaactgcagccagcacccgggcgctcttttccagaggaacgcccagagccagagccgcacccagcacatccagcgtattatataccataaacccgccgggaatgccaactttgatgggcgtgcggctatcctttgtcaccgcatcgaaggcgatgtggtccgccgcaagggtgatatgctccgcccgcaggtctgccgcggcgtgctctgcatagaagtactgccgacatgcggcgttttgcagcagccgctctgtccagggatcgtcggcgttgcagacgcccacgtcgcagttctggaacaggatggccttggcgtcgcagtaggcttccatggtcttgtggaaatccaggtggtcctgggtcaggttggtgaaaatgcccaccgcgtagtggataccgtacacccggtccagcgccagagcgtgggaggatgcctccatcaccacatgggtgcagccagcggagcgcatccgggcaaacagctcctggagctccagggactccggcgtggtgcgctcagtgggcaccacctcatcgccgatcagatcctggttggtgccgatcaggcccaccttggcccccagctcctgttccaggatggccttgagcagataggtggtggtggtcttgccgttggtgccggtgacggccaccatggtcatgctgtctgccggatggccgtaatagttggcggccatcaccgccagggcccggcgagagttctccaccaggacatagggcacggagctgtcctccggcggtcgctcacacaccaccgcggcggctcccgccgccacagcctttccgatataggcgtggccgtcggtggcaaagccggtcatggccacgaagacgtccccgggtgccgtggtccgggagtcatagctgatatgggtgatctccgtctccatgtccgcggtagcggaccgcagggagagccctgccagcagcgttttcaaatgcattgtatgcacaccccttttgttcagtctggcagcagtttgccgtccctcattataaacaaggggatttgcaaagtatacggaggaaggtgccaaaaaccatgcagaacctgctttctcaatccaggacagagttgtcgccgaactggacggtcaccaccgtgcccgccgccacctccgtgcccgcagggagagactgggtaatggcgtagacattgccggagctggctgtggtggtaccggtcaccttcatgataagtccggcgttggtgatggccttgttggcctctgaggcgctcttccccaccacattgggcacggtgcagggggtgtccggcttctcctgccccaggtagaggatgatggaggcatttcccggcacgatggcgccgccggcgggggtctggtcggtgaccgtgtccccgtcccccacagtgcggaaggtgaagcccaggtcagccagccgatcttcagcggcctccctggtctgtcccaccacattgggaaccgtggtgtcagcgcccaccagctcctcggcggtgtaatccggctcaacgcccagcagaggcaggatctcgctcatgatctggctggccaccggggccaccatggtgccgccgaacacggcagtgccggtcgtgcggctgggggtgtccatggtcagcagcatgatgtactgtgggtcgtccgccggggcgaagcacataaaggacaccaccacgtccttggtgccggttttatccgcagtgccggtcttgccgccgatgcggtagcccgtcacctgtccgttgcggccgccgccgtcggacaccacccactccaggcactcccgcaccttggcggaggtctcctcactgatgacctgccgcaccgctgtggtctcgtgctgactgaggatgttgccctcgtcgtccagcacctgttctaccagatagggggtatacagatagccgccgttgatggtggctgcctgggcccggatcagctccaggggcgtgacgttgaaggtctgtccgaaggagtaggccgccagggaaaccacgttggagttgaagctgtcctcattggcaaagatgccttccgcctccgcaggcaggtcgataccggtggtctccatgaggccgaaggacttcagatagcggtagtatgcctccgtgccgatcttcaggcccatggtgacgaaggccgggttgcaggagttgccggtagccaccttcagggtctgggtgccgtggccggcccgcttggaacagttgatggcttttccccagccctccacgtggatggagccggtgcaggtgaaggtggtgttcatgttcaccacgccctcctccagggccgtggccagcgtgatgggcttgaaggtggagccgggctcgtaggtgtcctgatagcacttgttccgccactgcttgaactggatggtggcccgggcattcgccagcgcctgattgtacgcctcctccgtctcgtaggtgctgcggttctgctggatctccgccagagcggcatccaattccgcctgaagtccctcagtatagatggtggaaaagtctcccggatcatagttgggataggaggccatggccacaatgccgccggtgttcacgtccatgacgatgccggtgccgccgttggccgcgtcgtacttatccagcatactctccaggcccttttccagggcgtactggacgttggtgtccagagtcagcaccaagctgctgccattctccgcatcaaacatctgctcgccgccgctgaacaacaacggcgtgccgtttacgttggtaggcgtgatggtcagtccagtgctgccgctgagcacgtcatcataggacgcctccagcccgtaggcgcccatattgttggcattgacgaaccctatcacattgcctgccagagagccgaagggatacagccgcttggtgtccggcgtcagggagatgccttggagccgggtgggccgcccgccggtagagatgagaacggtgttgccgtcctcgtccaccgtggtaagctggttcccctcatcgtcgatctctccgttgatgaaccggcggacctcgtcggccacgtcctggtctaccttctttttgacctcccagtatcggttggcggtgttctccaggtgctccaggatggtctcctcctccacatccagaatgcggctgaggccccgggcgatatacgcctggtccagcacctccggcgccgtgtaaggcgctcccttctcggcagcctcctcggccgcatcctggatcttctgctcctgggactctacaaagtcctggacgccaccgggatccagtaagactgtctccgtggagtaggagatggccatgatctcgccgtttttgtcgtagatcgtcccccgggaggcgctgatgaccatgctgtcggtctgctggctcaccgcctcggccttcagttcgtcgtgccggttgatctgcagatcgtacagcttccaaaacagcactgtgaaggaggccacacccaacagcagcatgatgagcatcgtcctgccccggattacctggttcgcccggcgggcggcgtcgctctttcttctgggtctgtccgtcatgcctgttctcctttcggaacgccggggccgcttcccccgtccatacgcaataccaaagcaaggagtaagaaggcccccttcttactccccaccgttcgcttcattatagtgcggccgtcactcgaaatattccaccacggcgtagatcccgtggttcagcgaggtcagcaaacggctgagcagattggactcctcctgctgatagaccacggcactgtcgccctccgacagatcgatgtaatagatctggctgctgctgggcttgctcatgcccgccgcctccgccacctctttcacggtggccaggtcaaacatctgctcgtgctgggcggtgagtgtgacgttctccgtctgcagctcctccagctggttctggagggacaccacctcgtcggagatgatcgtcagctggatgtagcccatcagcaccatcactgcaaggccgatggccgcgcccacgcccaaaacggagaggacggacaccttctgccgctggcgtacctgcgccttggagaggctccgcacccggggcttcgccttggggacggcctctaccgccgtctggtgacggggagcctctccggcgtgccgaagagcgcgctcccggacttcccggtccaggtcgtacgccaagtccccatataccgcgctgcggctgttgtaccgcagttcccgcgctgctgccaaagaaggtccctccttttgctccgccataccggcacggagccgttctcacacacattaacaccggatggtcccggtgtggtcaaaggtcaaagccgaacttttccgccacccgcagcttggcgctgcgggcccttggattctcctccagctccgcgccgcccgccgtgacgggcttgcgggtcaccagccgcacctggggctttttgccgcacacgcacaccggaaactccggcgggcagacgcatccccgggccagctccgccagcgtccgcttgacgatccggtcctccagagagtggaaggtgatgacggccaggcgaccgccggggttcagcccgtccaccgccgcccgcagcatggggggcagggcatccagttcaccgttgaccgcgatccggatggcctgaaagctccgcttggccgggtgctgcttctcccgcagagctgcgggaggcatggcgctcttgatgatctccaccagctccagggtggtcttcacaggcgcggtctcccgcgcccggacgatggctctcgcgatggcgggggcgtaccgctcctcgccgtattcaaacaggatgcgccgcagctcctcctggctccaggtgttcacgatgtccgcggcgctcaggggggcggaggtgtccatccgcatgtccagcggggcgtcctgcatataggagaagccccgtgaggcgtcgtccagctggggagaggacacgcccaagtcaaagagcatcccgtcggcgccgctgacaccgcaccgggacaggacctccttcaattccgaaaagttgctgtggatcagcgtcacccgggccagccagggggccagacggtcctgcgccgcgtcgatggcggcctggtcccggtcgatgcagatgagccgcccggtggtcagccgaccggcgatctcccgagagtgtccggctcgtcccagggtgccgtccacatagatcccatcggggcggatgttcagtgcttggatgcaggcgtccagcagaacaggcttgtgcgtgtattccatcggcactcacccgcggctgcgccggacacgggccagggcgtccatggccgcggccatatcgtcgctctccagcatccgctgctcccgctccgtccaggtcttctcgtcccagatctcggcgaaggaattcaatcccacgatggtggcggtctttttcagtcccgcgtgggcccgaaggctggcagggatcagcacccgcccctgggcgtccggctcacactggacggcgttggcgtatagcagcgtcagcgcccgggcctctgtataggagaggtcgtccatctcctcggacatctggtcccacttggcctgagggtaaatggtcaggcagtgctccgcgccgatggtaatgtagaacgtgtcgcccagggcctcccgcatggcggaggggatcaccagacggcccttggagtcgatgctgttgttggattttcccaacagcctggccacggttgatcccccctttcccgcgttttttgggtctggatggggtctctttggcacttaatctctacttttacccacttttccccaccacatgctctgagtataagcgaaattggccgggattgcaagcagttttttccgggaaaaccgccgctaagaacgccaaattatggcatttttcggccaaaatcgccattttaaaacagatgttcgacatctctttgacaagtttacgtaaaataaaaaacaccccatgacgcaagaacttgtgccatggggtgctttttttcattttctccgcaacatctagagtattccaaaaaagtttcgccaaatcctttggcgtttttcacaaatttttaagattacggttgacctgcggcatcactcctcgccgccatcctcctggggcggggtcctgccgtccagcttgtcccgctgctcctgcattttggcagcggaggcactgcggaaccgcacccgctgctgcttcacctcatccagcgccatctgcaccgcctcctccgtgcgggccagggcgtcctcggcatactcattggtcacctggtacaactggcggcagcgctcctccgcccgggccaccatctggcgggccttctccttggccgcatagagcacctcgctgtcggacaccttggtcttggcatccagctccgcctgacgcatcatccggtccacgtcccgtttggcatcctccacaaacttgtcccgggcggagagcagctcctgggcgcgcttgatctccaccggcagctgggcccgcagctcgtccagcagatccagcagctcgtcccggtccaccatgctcatattgggtttcagggccggggacttggcgtcctcgatccgctcgtacagcatatcgatcaaacggttcacatcatttgccatgggactcatccttccttcttttccgtcatctcccgcaccagaggcacgatggacgcgggcaaatagttttcaagcggctggtgatagcggatcatctcccgagccatggaggagctgaagtgctgatatgccgcgctggcaggcagtagcagcgtttccagctccggatggatcccccggttgatgagagccatctgatattccacgtcaaagtccgtggtgttgcgcacgccccggacgatggcggaggcatggtgccgcaccgcgaaatccgccagcaggcccggccacagctccgcctccacattgggcaggtccgccaccgccgtccgcaccagctggagcttctgctccggtgtgaacatctggtttcgcttttcagcgttggggctgacacagacacagacccggtcaaagcaggcagccgcccgccggatgatatccaaatgccccagggtgatggggtcgaaagagccggagcaaatcgctgttctcatgggggtcattcctcgttttctcggtctccgccccggcggatcagcgtcagggcgatcctgccgtaacggtaggtgcggcgcacccggtagggcgccgcaggcgccggaaggctccggtccgccgggtgttctgccacaattataccatggggattgagaatgtcaaacgctgtcagatgggcgacggcgggctccagcagccccgcctcatagggagggtccagaaacacgatgtcaaaccgctcccgcagtgaccgcagaaactccatggagtcccccgccactacccgggcccggtcctggagctccgtcagcttcaaattctcccgaatcagcttcacggcgtcggcccgccggtccacgaacacggcagaggcggcaccccggctgaggcactcgatgcccagctggccggttccggcgaacaggtccagcacccggcgcccctcgatgtcgaactgcagggcgctgaagagcccctccttcacccggtcggtggtggggcgggtctccgtcccttccagctccttcagccggcggccgcgggcagtgccggtaatcacacgcatggtttttcctcctctcggtgcctccggttctcgcgggcgccggagatcaggtacaggatcagccccgtccagacgaagccgaacaaaatggcgtgggtggcggtgaatgcctctccatacagcgccacggacagcagcagctgcatggtggggttgatatacatcagaatgccggagagggtcattggcgtggttttcatgccggcggcgaagaacatcagcggcacagtggtcaccacgccggacaccggcagcagcagccactgccaaccagagaggaccccggcggcgccggtgccgtgggcctccatccagaagatcagcaccagggcaaagggcgccagggtcagcgtctccacaaaggtggagaccgccgcgtcggaacggacctgcttcttcagcgccccgtaaacagcaaagctgccgccgatcaccagggcgatccaggggatctgccggtagcggatgacagtgattaccagtcccgcgaaggtcaccgccaccgccagccactggagctttgtcagccgctcccggaacaggaccgtccccaacaggatcgccaggatgggattcatatagtaggcgaggctggagtcgatcatgtgcccgttggccaccgcccagatgtagacgccccagttgacgcagaccacgcagcccgcagcggccagcagcccccactccctccggtcccggaacgcggcccgcacaccggccagccggtcccgccgcagcagcaggatgcctccggtgagcaccatggaccacacgatgcggctggccagcacatacagggaatccacctgggccagcagcttccagaagatgggcagcaggccccagatgacatagcaggtcagcacatacagcgggcccttgtttttcattgggtcgctctcctttcccctccagccttcacctctgtggccttcagtttctgaaaaatcccgtgatttgtctattttacggcaagccgcggaagatttcaatagctttccgcgccggagccgggtcttttttagacttgtactttcacggggaatcgtatataataaggttctcaaagtacaggctgtggacagccgctgtccagagcaggcggcccgccgcccttcgtgccaaactcctgggaaagaaaggacgttctcatgattcaattcaagtctgaccacggcgatatcaccgtcagcagcgccgtcttctccaacatcaccggcatggcggccaccaactgcttcggcgtcaagggcatggcctaccgctccatgacggacggcctggtgcatctgttgcgccgggaggccatgagcaagggcgtcagcatcacttatcacgacgacaactccatctccatcgagctccacatcatcgtggaaaacggcgtcaatctccccgcggtctgccgctccatcatgaatgaagtgcgctatgtcgtcacccggaacaccggcgtcaccgtcaaggacgtggacgtgtgcgtggattccatgaccctgtgagggaggaacgagacagatgaacgaacaaatcaccggcgcactgttcaagcggatggtgctccacggcgcagccgtcatcacggcccagaagcaggccatcaacgacctgaacgtctttcccgtgcccgacggcgacacgggcaccaatatgtccatgaccatcggcaccgccgtgacggagctgcgcaagagcgagcccgccactgtggagcaggcggcctccgtcactgcctccgccctgctgcggggggcccgcggcaattccggcgtcattctctccctgctgttccgaggcctgtccaaggccctgaagggccgggagactgcggacgccgccgctttcgccgccgccatgcaggagggtgtctccgccgcctacaaggcggtgatgaagcccgccgagggcacggtactcaccgtctcccgtcttgccgccaagcaggcggtggacacagccgccgccggagagacggacctggagcgggtcctggaggacgccatccgagtgggctatgccgccctggcccagaccaccgagatgaacccggtgctgaaaaaggccggcgtggtggacgccggcggcaagggctatctcctgatcctggacggcatgctggcggaactgcggggcgagcccatgcccgagacggaggctggcgagtccagagaggagaaggcagacttcgccaccatggcggcggaggacatcaccttcgccttcgacacggtattcatcgtccgcaaggccatggccgatatctcgctggagccgctgcggacatatctcaacagcatcggtgacagtctggtgatcggcgaggacgacgaggcctttaaggtccacgtccacaccaacatccccggcaacgccctgaacgaggcccagaaatacggtaccctggagctggccaagatcgagaacatgcggacccaggcggacgacctggccgcgggcaagcacgtccagagcaccgatgacctggacgcggtggaggcggagctggagtccgtccccgtggaagaaacgcccgccgtggcggcgccggagaagccctacggctttctggcggtgtgtgctggggacggcctggccgccgtgttccgggacctgggggccgacggtgtggtgtccggtgggcagaccatgaacccctccaccgagagtattctggagggcgtgaacaagatcccggcggagacggtgttcgtcctgcccaacaacggcaacattattatggcagcccagcagtgtgccgccctgacggagaagcaggtggtggtgatccccaccaagaccgtgccccagggcatcaccgccatgatgaacgtggatttcgacgcgccggatgcccagaccattactgacgccatgacgggaagcctcagctccgtcaccacggcccagatcacatacgccgcccgggactccgacttcgacggcttcgccatcaaggagggcgattatctggccctggaggaaggcaagctcttcgacacggacggttcccttgacacgctgctccacaagctggcggaggacgccgccgggcgggaggcctccttcatctccctgtacttcggcgaggatgtgcaggaggcggacgctcagaaggccggggccctgtttgaagaggtgtgtcccggtgcggaggtggcggtcctctccggcggacagcctgtgtactattatattatcagcatggaataaagcatcaggaggtgtttctgtttctttcaagcagagacacctctttctttttgaaaaggaggcgccctatgaagacctggaagctcctgctgctggccctggtgcccggcctgtggggctggctgtgcaactggctcaccgccgtgtccctgaacggccctgccttcctgtttacactggcattttatatccaggtgcctgcagccatcgtgttctgcctctggctggggcatctgtgcggccgctccgaaaggagctaccccgcctgcctgctgctgacccagtggcccagcctggtgagctttgccctgtacgtgtggcagttccactttgtctccagtgaggcccggagcttcctgctggcggggctggggcagtaccccggcctcccgctgttttccctggcctgccggctggtgatccccttttccaatcacagctgggggccgccggaaaccttggcggccaatgcgctctccctgctgatgctggcggtgctgttctccctgggcttcctatggggccggcggaggcggtgacccggccccctctcctgaaaaatgccccagcccgggccgtcaggcccgggctggttctttaatgcctgtaccagatcagcatactgagttgagtctcctccgtccccgggttccggtagcggtggggctggtccgccgggaagcgcagggagtcgccggtccggagccggtaggtctcccccggcaggccgatctccgcctccccggcgaagacggtcacatactcctccgtccccggcagatggggctgggcctccagtgcgccgccggggagcatcacgatccgataggtctcgaacccccgctccccgtcaaaggggaaggccgggcagttccggtacctccccccatcctcctccagaatcggcgcgtcatcgccccgcagcagcaccggccgctcccgggccggctccaccagcgaggtgaaagacaccttgtaaccgttggcgatcttccacaccatggagatggtggggttcacgtcccccttctcgatctgggccagcatactgcgggacacccccgttagacgggcggcctcgtccagcgtcagccgcttctcctcccggagccgccgggcgttctccgacaccactgcgttgatctccaaacgtttctcccctctctattgacaagatattagatgaatcatataatatacaggaaatccagtatcttgaaaaaattccattggatattgtactgcacccggaaacggtccgtcaagagcggtgcggtagtttcccggcgcggcaccaaaaggaggagtcgtatgcgcagactgagagccgccgcactttccgaggtggagctggctatggacatcatcaaccaggccaaggcccacctgcgggcacaggggatcgaccagtggcagacgggctatccggaccgggactgcctggaacgggacgtccgaacgggaaaagggtattttctggaggaggacggcatccctctaggctacctctgcgtcgatttcgacggagaaccggcctacgaccatctgaacggcacctgggcccgggaggagccctatgtagtggtacaccgcctggccctatccgacgcggcccggggccggggcgccgccggtacggccttccagctggtggaggacctgtgccgggatcggggggccgggaatttcgggtggacacagacgcgggaaatcataaaatgcagcatatcctggccaagcaggggtttcagtaccggggcaccatccggttcgacaacagtgagaaaatcgcctatgaaaagctcctctgaccgccctccaccgctgaatcaggaacagccggcccccaccagggccggctgttctcagttttccatacagggttacagggccgccatctgggccgccacgctctcctcgcagctccgctgagcctggagggttttttccatcagctcttccagcgtccaccccagccgctcagccccggtcttgatgacgtcccgggagcagccggcggcgaacttcttgtccttgaacttcttcttcagggagctgacctccatgtcctggcagctcttgctggggcgcatcagcgccgccgcgccgatgaggcccgtcagctcgtccgcggcaaagaggaccttctccatctcctccgtgggctccacgtcagagcacaggccgtatccgtggctgcatacggcgtgaatgaactcgtcgctgcagccgatctccgccagcagctccggagcctttttgcagtgcgcctccggccacttctcaaagtccacatcgtggagcaggcccacggcggcccagaaatccgcgtcctcgccgtaacccagctcctgagcgtaccagcgcatgacgccctccaccgtcaggccgtgctggatatggaagggctcggcattgtacttgcgcagcagcgccagggccgcgcttctctcgggacatgctttcatctttgatcgctctccttttgtaaaatcagaccggggcagcatcccggggatccgggtcgccctccagggtgacgaagtagtcgtaatagggcagcaggaaggtgaagtcctgtctcaggcgctccacgatgtcccggctgaacagctcgtccgtcagcttgtcattgtgacagatggtgaagctcctggcccggtaccagggctccagcagtttggaaggggccggggccctggggcgcttgtagtcctccgtctccaggacaagttccttctggcggttcagcttccgcatcagcttctccatggcggcggggtcccggtcgatccgggcccgcagcttggccatcgtcagcggcttgggcatataataccccatgccgcaggtccacccctccggcatcagctcgaaccagaaggtggggtgggccgtccactcctccgagggctgctcgatagagaaccacaggctctccttataaggcccccggccgtggagccgccggacgtcccggtagatccgggtcaccttgcggatgagccccagatccggccgcttggcggcgatgtagtcatagagctcgtcccccagctcccgcatgggctgataaaagtgcgtcagataaatctccttgtgagcttcaaaccaagcccgctcgttgttgaagcggatgccccacataaagtccacagtctcgtctgtaaagccggtaaacatcccgttcctcccgctggatttcaaaatttaagatttagtataacacattttccggccatggaaaagaggggaacggcgttttttcggcgcccttcccctctttccgctcacagcgcccgctccagcagggccatcagctggtccgcctgacggtaggattcctctcccagctccttcagcagcctccccaggcaggggtctgtggtctcctcccccgcccgcaggtagttcatgccgttgcaggcctccacatggtaccgctcccgcagggcggggcaccagctatctatggaaatccgtccgctggccaccgccgggcggtagcagttcccagtgatgaggtagtaggccgtcatcagccgccgggcagctgcgcccgacgcgtttgccaaatcccgcatcgtcccccgggcgaaagccggtgcccgccgggcgaatgcctgataggtccgccggtctgccagctccacctcgatgaacccttcgatcactcccagttcctcctgcgccatggtgcccatgcagcaggggttctcctccgcaccgggcaggtgctccaagtcctcaccggccggcggctgggaagcccgcggtgcggcaccagaggccaggggcgccatcgcgggcaccgccggctcccgcaggtcgggatagggctccaggttgggggccacccgccgccagatctggtcgtatttccggaagtcataggtctccggagtatgtatggtctgttccatccaggtccctccttttctccccagtgtatgcgctttggaaaaaacggttcctgttgcaaaaatcacacgtatgaaattcgccccagggttaaaatatcataggacgagagttccctttttcattgctttttcccgttgtttctgttaaaatagggaaactgcgaggattgatgccagcaaaggaggttccgattgtatgctggaattgaaacatatcagctacgccgtccgggagggcgacagtgagctggggatcttaaacgacatctccctgaccatcgacgaccaccgactggtggtgttcaccggtcccaacggcggcggcaagaccactctggccaagatcatcatgggtctggtgaagcccaccggcggccagattctgtggaacggtcaggatatcacggacctgggaatcacggagcgggcccgtctgggcatcagctacggcttccagcagcccccccggttcaaggggctgacggtccgcaacctgctgaccatcgcctccgggaatgagaagctgtccaaggaccagtgctgccagtacctgacgaaggtgggcctgtgcgccaatgactatctggaccgggaggtggacgcctccctctccggcggcgaggtgaagcgcatcgagattgccaccatcctggcccgcagcagccagctgatgatcttcgacgagccggaggcgggcatcgacctgtggagcttcgcccggctgacagagacgtttgaacagatccacgccagcggcaccgcgaccatgattatcatctcccaccaggagcggatcatctccctggcagacgagatcatcgtggtgggcgacggggagctgcgccaccggggcacacctgaggagatcctgccccagatcctggcggacaccctgtccgggtgcccggtgctgacgaaagaaggtgctgctgtatgatggacacacaggtggaccgggagctgctggagaagatcgcggacctgatcggtaagcccgtgggggccttcaacattcgtaaggactgcggctgtgacggccgggtgtccacggagcacatcaagatcgacgaccggaccgacggccacgccggcatcgacatccggattctggacgggaccaagggcgagacctgccacatccccgtcatcatcaccaagtccggtgtggaagagacggtgtacaacgacttctacatcggcggggactgcgatgtggagatcgtggccggctgcggcatccacaactgcggcgaccaggagtcccgccacgacggcatccacaccttccatgtgggcaaaaactcccatgtccactactcggaaaagcactacgctgagggggacggcaggggcgagaagatcatgaacccccagaccatcgtgtatctggaggagggcgcctccatccagatggacacggtgcagatccggggcgtggactccaccaagcggtacaccaagatcgtctgcggcaagggggccgaggccgtcatcacagagcggctgctgacccacggccgccaggtggcggacagcgacatggtcatcgagctgaacggtgaggacgccaagggccgggtcatctcccggtctgtggcccaggacgagtcctcccaggtgttccgcccctgcgtggtgggcaacgccaagtgcttcggccatgtgcagtgcgactccattattatgggacaggccaagatcagctccgtgccggagatcgccgccaacgacaccgaggcccagctgatccacgaggccgccatcggcaagatcgccggggaccagctgctgaagctggagaccctgggcctcaccgaggaggaagcggaggaccggatcctcaagggatttttggcataaagacagaccgcggggcggctggccggagggccggccgccttttttgcttccccgcccccagagagggggctttcttccggaggcgccgcaggggcggcaatctgccgcccgggtggattcagccatgaggatggctgggcaatgcccggtccaaaagaaaaggccgcttttggcgcacgccggcgcattcgcgcctctgtgctgacgggggtcggcgtatcggtgcaagcgccgatttgggcttgccttcgggcacgctatcatcttctgcgaggtcgtgactgctgtcccgtggcggatggtgccgacagcgtcggggtgcaaggatgcattcgaccagcttctctttctgcgccttccgcttcgccaggcgctgcctgcttcttcgcgggagcgtgagcggcagcggggagaggggcagggggtatccctgtacctccccgggctggaggtttccccaagggcggcgcgtttccgtctctgactgccgcaagggactgccaaccttcccccgccggcggcaggagggctgcgcctgcgcaggccgacccgccgaacatgttttcttttccaccgggcgcggcgcattttctttttgatgtctcaaaaagaaaatggggcgcgcatcccctgcgggagcggaatcccccgcggccgccgttcggcggcccatccctctccctgccgggatggagaatttttttcaaatccgtgtaacgaatcccccgccagccggacatacctgacagagaggagggagatgcccttggccaacatggaagaaatttaccaggcccatgccaggaccgtctataaatttctcctctcccagtgccatgacgccgacctggcggaggagctgacccaggagaccttctaccaggccgtccggtccatcgaccggttcaacggctcctgcaaggtgtccgtctggctgtgccagatcgccaagcacctgtggtaccagcacctgcggaaacgaaaaccggaggagcccctgccggaggacggcctgccgggcccctccgcggaggaggacgtgctcacccggcagggccatctggacctgctgcggcagatccatgccctgccccccagcacccgggaggtggtgtacctccgggccttcgggggcctcagcttccgggagatcggggacgtgctgggacggacggagacctgggcccgggtgacgttttaccggggcaaggaggcactgcggaaaggaggagcagaccatgaagaacattcctgaattatcctgcgccattgtggaggacctgctgcccacctatgtggagaggctgacctcggaggaaaccaacatggcggtggaggcccatctggcgtcctgccccgcctgtgcggccaagcggaccgccatgggggcgaaggaaacggaagcggcgggtcaaaacgccgaagagaccgcccgggaggtggactatctgaaaaaggtgcggcgcaggaaccggcggagagtatggctggcggtggcctgcaccacgctggtgctggcggcagtgattcttacaaaaatcttcatcattggcgggccgggacaagccaatgatgtgggggttcgcctcgtggaaattgtggatggggacaccctgtctgtcaatgtggactgcctgtatgctgtcaatgccttctacggctgggaacaggatgagacagaagatggggttgtttctttcaccgcccgtgaagcgagagcctctttcattcacccaaacgatctagtagaccttcgggtcccactggaggggcttaaggaagtctgggtctgtggcaggctggtctggcagaacggcaccactattcttgaatccacactgtggatctacgacgcccgcaccccctatgtaggcgacgccactgccgtggggaacctggtccatgagatcggcctctggctttccagtatggagctcccctataactacaccatcagcctgcaaaccaccagcgagccctatggcctgaccattcacttcgacagcgtcaccgctcatgtactgggtgtggagcgcgacatcgacaagcggatgtatgccatcgctccctccctgctggcgctgatcggcaacctggggcaggtgcagtggacctacgccgccccggacggcaccgcagtgacccgctctgtgacactggaggaagtggaccaggccctgccggattggatcgaagcctacaatctggatgccggcgcggattggactgccccggagagtgtcaaggattacgccacctcaccggcagccctgcagcagctgctggacctgacatgtcacggcttctatgtggtcacggaagaagatggaaccaccattttcaccccgcaattctaaaacagcgtcagaagtgccccgtctcaaaggagacggggcgcttcttttgtgcaaatgaagccggctcattcaattcccttgccgttgttccacttccactcccggatctccggcaggtccacgccgtgatccttgatatactggcggtgctccaccagcttgtcgttcatccgctggaccagataggcccccggttacccagggagtgcagccgctggaccacgtcgatcaccagatggaaccggtcgatatcgttgaggacccgcatgtcgaagggcgtggtgatggtgccctcctccttgtagccacggacgtgaagatgcttgttgtgccggcggtaggtcagctcatgaatcagcgtggggtatccgtggtaggcgaagatgatgggcctgtcctgggtgaagagcatatcgtactccatgtccgtgaggccgtggggatgctccgtgtggggctggagcttcatcagatccaccacgttcaccacccggatcttcagctctggcagctccttccgcaggatcgtcaccgccgccagcgtctccagagtgggcgtgtcgccgcagcaggccatgaccacgtccggctcctccccctggtcgttggaggcccagtcccagataccgatgccctgggtgcagtgcttcaccgcctggtccatggtgagccactgggggcggggatgcttgctggccaccatgacgtttacatagttccggctcttgatgcagtggtcgaacacgctcagcaggcagttggcgtccgggggcaaatagatgcgcaccacgtccgccttcttgtttgccacgtggtccaggaagccggggtcctggtgggtgaagccgttatggtcctgctgccacacattggaggagaggatatagttcaaagaggcgatatcctgccgccagggcagctcgttgcaggtcttcagccacttggcatgctgggcgaacatggagtccacgatgcggatgaatgcctcgtagctgttgaagaagccgtggcggccggtgagcaggtagccctccagccagccctcgcacatgtgctcggacagcatggagtccatcacccgaccgtccgggtccaggtgctcatccgggtcctcattctcgtaccgctcccccaggaagcggcggccggtgacctcaaacaccggatggagccggttggaggccgtctcgtccggggcgaagatgcggaaattccgggattccaggttcagcttcatcacatcccggacgtagccgcccagcaccagcatgtcctgggcctccacctcgccgggggcgggaacctccaccccgtagtcccggaagtccggcgtccgcaggtcccgcagcagcaggccgccgttggcgtgagggttggcacccatgcgccggtcccccttgggggcgaaggagcgcagcagatccaccggccgtccctcctcgtcgaacagctcctccgggtgatagctgcggagccactgctccaggatgggcaggtgcttttccgtgtcagggcccatggagatgggtacctggtgggcccggaagcagtcctccacggggtttccgtccacctccttggggccggtccagcccttgggggagcggaacacgatcatgggccagcgggggcgggtggtgtctcccgtggtgcgggcgtgctgctggatgcgcttgatctcccggatggcccagtccagggtggcagccatctgctggtgcatcttctccggctcactgccctccacaaagcggggttcccagccgcagccgcggaagaactgctccacctcctcatgggagatccgggagaagatggtggggttggcgatcttgaagccgttcaagtgcaggatgggcagcaccgcgccgtcagtgatggggttcaggaatttgttggagtgccaagatgtggccaggggcccggtctccgcctcaccatcgcccaccacgcaggcggcgatgagatccgggttatccgccacagcgccgaaggcgtgggccagagaatacccaagctcgccgccctcgttgatggagccaggtgtctccggcgccacgtggctgggcacgccgccggggaaggagaactgcttgaacagtttccgcatgccgtcctcatcctgggtaatgttgggatagacctccgtataggtgccgtccagccagtcctgggccaccatggcgttgccgccgtggccggggccggagaggtagatcatgtccagatcgtccttctgaatgacccggttcaggtgggtgtagatgaagttctgccccggcacggtgccccagtggcccacgatggtctgcttcaggtcggaggcggccagtgggcgcttcagcaggggattgtccaacagatacagctggcaggcggagaggtagttggacgcccgccaccaggcgtcgacctgtttcagctgcgccggcgtcaacggcggctttttagacaggcgtgtattggttttaggctttgctgcaattgtcttttgagaagtccgtggcatattattacctcctttttcttgttcctttcgcaattagtatatctcttatttgaaaaaaggcaagcgaaattgaaaataattttatcttaatttacaattatttcattttagcattcctcttttaggcgttttacccttattctatcccttccgccgcgcttgcgtttttccgccggatgtgctactgtaacggcatggaaacgtatgaactcatccgctccggccggaagaccctggccctggagatcacaagggactgccgcgtggtggtgcgggccccccgccgcctgtcccaggcccgcatcgacgactttgtggccagtcacgccggctggatcgcccggcacctggaacagcagcgccgccgggctgccctggccccctccgcccccacccaggcggagatcggcgccctgaaggaaaaggcacggcaggtcctgccgccgaaaatcgcctattacagtgagaaaatgggcctgttccctactggcgtcaggatcacctccgcccgcacccgctacggcagctgcagcggaaagaacagcctgtgcttctcctgttttctcatgaactgtccggatgcggccatggacctggtggtggtccatgagctgtgccacatccaagtgaaaaaccacgggccggatttctacgcgctgctggagcaggtactccccgactggcgggagcggaagaagctgctgcgataacgtgtaaaagcacaaaccggaggcatggcttggccgtgcctccggtttatgtctgatattacgcccccaccgacgtgagccagaccgccgccagcagcaccgccagcagcgctgcattccaggcggtaaacaccgccagataccgggcggggcgggcccccggggagcgaagatacagcttgagcgtgatcaaacttgctagggatgctaccggggttcccagaccgccgatatccacgcccagcaacagctccctccaattgtccgtgaagcccgacagcagcaccgccgccggtacattgctgatgatctggctagtgagcacgccggtcagcaaggtgctgcgctccagcagactctggagaaacccatgaacggcaggcagccgtcccaggtttccggataccacgaagaagcagatgaaggtgcacaacaggctcacatccagcttccgcagcagagcaggttccactgcggccagcgtcccaagcaccagaaccgtcagcagaccatagggcagaatgcggaacaccgtcagcaggcacagcaggaacagtgcgccgtacagggccagcttcccgggctgccgcaggggctgcgggtgcaccggagggatctggagatccctgggcaggaccggcaaggccgccgcggtcaggcaggccagactgatccccgccaggggcagcaccaccgggaaaaaatccccggcagagagtccataggccccgtaaaggtagaggttctggggattgcccaccggcgtggccatgctgcccaggtttgcggcaatggtctgcagcaccagcagcggcaccgctgcggcccggcagtccatctggtccagaagcagcagcgcaaagggtgcaaaggtgataagagcgacgtcattggtcacggccatggagcagaaaaagggcagcagcaccaggatcactgccagggccctgggtccggtcccccgggacagcagatggccggccagccactggaacgccccgcaggactggaagcccgccaccaccgccatcaggcacagcagcaggcatagcacccgcaggtcgatgtagcccagataggcggcgtccggcggcaccaggaccatggtggccagtgcgcagagtgccgccacggtcagcaccgcctcccgcttgaaaaatgccaacagtctcatttctgtccctccaaaggctgacaaaatccgcgttccaccatatcacactttttccgggaacgcaaacctttttggggaggctgtgctgttctaccgcaggcagcccgctagccgccgggacagcatccacgccaaggccagcttcaccaggtccggcaccacaaaggggaacacgcacattcccagtgctgcccacaggccgatgggccccgccgcccgggcataggccaccaggaaccaggcggtgccgaaggcatagcacaccagcaggcccagcaccatggccgcggccgtcaccgccggacggtcgcccagccgggcggtcatgccccaatacagcagggccgaggccagaaaacccaggatatacccgccggtggtgcccagcagaacgcccgggcctccctgaaagcctgagaacaccggcaggcccaccaggcccagcagcagatatgccaggatagccaatgtcccccgccggccccccagggtccccagggctgcaaacacgccaaaggtctggagcgtgaacggcactgtcaggggaatgttgatccaggcgcacaccatcagcagcactgcgaacagggcggcgtacgccaggtccaccgtccgcagccgggtcctagtcttggaagtctgtttcaaatcagatcgctcctctcctgtgtctggaggaagtatagcaaggctttccataattgtcaaccttaaaaaaataaagtttacaatatagataaaaaaccaggaggcagtgcctcccggttcagcagtccgtgtgggtgcagatctcccgcaccttggcctgaatagctttcaggtccacaaaggtctccggccgcttctccacatcccgcagcagcgcggagggatggtagatagccgtcatctggacgccgccccgctggaaccacttcccatgctcggcggtgatcttgaagtcctccttgatgatagccttggcggcgatccggcccagacagacaatcagcttgggccgcagcagcgccgtctgccgccggagccagccgatgcaggcgtcctgctccacattcagcgggtcccgattcctgggcgggcggcacttgacgatgttggccacatacaccttcgtccggtccaggccgatgatctccagcatatcatccagcagcagccccgccggccctacgaaggggatgccctgctcgtcctcccgctgaccggggccctcccctaccagcaggatctccgcgtcccgggcaccgtcaccgaacaccacgtggagccgggtctccgccagggcgcagttccggcattgtccgcaggcctgctccagcgcctcccaggtatccgccatccgcctccccctccttcgtgcctctctccggggcaccacaccggcggcggatgcccctcggccgcccagccaaatggcagcggcctctttgcggccattgtaacacaaaatcttccgccgcgcaatgaggtatgaatctcttccgtccggacagactggacagggagaggagggggacgcttgtctctgtggctatggacattttggacatacagctttctcggctatctgctggaacgggggtacgccatcgccacccacgcggaccggcaggcccggaagtgctttctgctgctgcccatgtgcccggtgtacgggctgggggccctggcggtgctggccctgccggaatcattgagcggcagcttctggtctctggccctgtggggcggtctggcggccacagcagtggagtatgccgtacacgttctctatgaccgtctgctgggtgtgcggttctgggactactcccaggtccggtggaatctgcggggccgggtctgcctgcccttctccctggcctggagcctgctggtggcagcagggctgccggtgatccaggcagcgatagccccggcgctggccgccgtgccgccaaccgccacctatgccgcgctgctggtgttcaccgccgacacagtggtctccctccagctgctgcgccgggcaggagatcccgcagtgctgtctctgggaaatctgcgggctgcgtaagaagccgggcatggggaaacgtccatgcccggcttccttttgcgtccggccggtcactgttccggcaggtgggcctccagccagtgcgccacgtccgcatagaccttctcccggcccgtctcctggaggatctcatgccgcaggccctgataaagcctgatctccacgtcccggacaccggagcggcggaagctgcggtacgcccgccggacacccttgcccatgtccccaccgggtcgtcctgcccggagaggaagaggaccggggtattccggttcatccgcttcaggttttcttgcttctcaatgcaggcgatcccccgcagcatctcccggaagagtccgatggtggggtcccctccgcagaggggatccgcaagatactggtccacgttctccgtgctggcggagagccagtcgtatcccgtgcggttgggggcaaatttctgattgtatgcctcgaaggccagtttgttcaccaaggggctggaatggcggtcccccacctttctggcctcccgggcggccaggacgcggcccgccgccaccagcgccgggggcatctgccccgtgcccatcaggatggctccggccacggtgccggggtagcggatcagatacgtccgggccaggaaggaccccatggaatgccccagcaggaacaccggaaggccggggaaccgctgccctgccagctcccgccgggcatagaggtcctgcaccgcccagtcccagctgcccctgggtccgaagtacagccggggcgcccccgccgccacggagagaccgtgccccaggtggtcgtggcctgccacggcaaagccccactccgtcaggtaggccgccaggggctcataccgcaggatgtgctccgacacgccatgggagagcaccagaaccgcccggggtgccatgtccggcgtccactccaccgcatggatgccggtccgcccgtctgcggaggggaaggtaaattcgtttctcaccatggaaaaatcatcctctctgtgctatactgtgtgccatcaggcgtaggatgcctgctttccgggtcgatgataccacacttccgtcacaaacgccagaggaggccgcattcatggaaacatacatcgctgccctggaccagggaaccaccagctcccgggccatcctgttcaaccgggccggggagatcgtctcccgcgcccagcaccccttccgccagatctacccccagcccggctgggtggagcacgatccgctggaaatctgggccacggagaagcgggccctggcggaggtcgtgggcgccgcccacatcgaccccaagcggatcgccgccctgggcatcaccaaccagcgggagaccaccatcctctgggaccgctccaccgggcagccggtctgcaacgccatcgtatggcagtgccgccggaccgcttccctctgcgacacgctgaaggccgacggcctgggccccctggtggcggagcggacgggcctgctgatcgacgcctacttctccggcaccaagatccggtggctgctggaccacgtccccggcgcccgggaacgggcggagcggggggagctgtgcgccggcacggtggacagctggctcatctggaacctcaccggcggggcagcccacgtgacagactactccaatgcctcccggaccatgctgttcaacatccacaccctccaatgggacgaggcgctttgccgggcgctgggcatccccgcttccctgctgccggagccgctgcccaactgccatctctacggccgtgtggccccggacattcccggactggaggatctggcgggcatccccatctgcggcagcgccggggaccagccggcggccctgttcggccaggcctgcttcacgccgggccaggcgaagaacacctacggcaccggctgcttcacgctgatgaatgtgggcggtgagccggtggcctcccagtcgggattggtaacctccgtggcttggtccctggggggcgagactacctatgccctggagggcagcgtgttcaacgccggcagcaccatccagtggctgcgggatgaactggggctcatctcctccgccccggagtgcgaccggctggcggagagcgtgccggacgccggaggcgtctacgtggtgcccgccttcaccggcctgggcgccccctactgggacatgtacgcccgtggcaccatcgtggggctgacccgtggcaccaccaaggcccacattgcccgggcggtgctggacgccatcgccttccaggtgacggatctggtacaggccatgaacgccgacgccccttgccccatcaccacattacgggtggacggtggtgcctccgtcagcgacatcatgatgcagacccaggcggatctgctgcgactgccggtggaccgacccgcccaggtggagaccactgccttcggcgctgcagccctggcggggctggcggccggagtgtggggcagtctggaggaagtggctgccctgcgccgcagccagcacgtatttctgccccagcggccccaggccgcctgcgaggcccagtaccgcctgtggcgccgggcggtggaccgggcgttgcggtggattgaaaacgatgtgtaaacaaatccggaatttgttgcgttcagtggaaaagtgcgctatactgaagccaagtgagaggcatgaaacggaaatgaagacgatcagtgcggcgtttcgtccgcaggtgaaaggagtttatcgacatggctttttttgaggatctgaccaaaaagacaaaggacctggcctacgtggccgccgacaaggccaaggatgtggccgccgtggcagcggataaagccaaggacgcggcggagctgacccgcatctccatggccatcgccggggagcagcgggagatcgacaagaactaccgcaccataggcgagtggttcgtcagcgagtacgagggggagatccccgacgccgtccgggacctggtagaggccgtcaacacctctaaggccaagatcgccgagctggaggccagcaaaccccgtaaggacgatggcgccgaggttgaggcagcagctcccgcccagaagatctgccccatctgcggcgcggcctctgacagcaagttctgcccccagtgcggcgcccctatgggtgactgagttcccgccataacaaagacaagcccgccggcctgatggccggcgggttctctttctctttcaaaaggtcaggcgcatgtcataccataccacgccgccgtgggtggactgggagacgccctcgttcacaaagccgaatttttcgtagtagtggaccagcttgtccttacaggtgaggacgcagccgcgtcttccctgggcccgggcgtcggcaatcacccgctccagcaccgctccggcgcagccccggcggcgataggccggcagggtgttgacgccgaagatcatctgccaggtgccgtcctcgtcgtggagggcggcgttttcatacatctcgtcccggagcgtgggctcgtcggtggtcatgccgtccacaaagctcaccagcgtgccgtcgtcctcctccagcagccagaagtggtctgcgtagtaggccagacggtctgtgatctccgccgccgtggcagcctccgctggtgggaagcaggcggcctccaccgccgccagggcagccgcgtccgccagagaggcagtccgaatgtgcatgaaaaaatcctcctcatttcaaataacggtaagtcagcagcaaccgggcggtgccgttgaactggttttccagccagaagggctgatccgccgcgaaccgcagggcgtcccgctccagcagctggaagtcctgcccctccgcgtggagcagcaccgtgccggagaggctggtggccaggcacacgcagccgggcaccataggttccggcgcgtaccggccgctgatgtacaggtccagaaagaacgtctcctgccgcaacacgttgtcatagggcagcgagggccgcaacagcgccttgcccccatccagccgggcggccttgttgtccagctcccgcagaagcagcagcggctcgaagtcgtcgttctccagcagcacctccgccgggacctttaatgccccggccagcttgcccagcagccccacagaggggttggcctcccccgctcgatctgccccagcatggagcgggacacgccggcctccgccgccagccgctccatactgagcttcttgctcttgcggatgcgcttgagattctcccccaccgcccgggtcagctccatggcgcgatctcctctctcggccaaaaaggccactatgttgcacaatagcggttctatagtatccggtttgtcggattttgtcaagaggaaagcgggacagccctgctgccccgccgggcaaatttggaaaaggacttgcaagcgaatcccaatcgtgatatcatcgatatgaaaaacaaaaatgcggcagtttccaggtgcgccaacacctggaaacctatgcaggtgatgatgcacctacacaacggccgaaaggccgcaccgcatgaattatgatacgacattccggcctttttgtaaagggcggcttttctcgttatccattcatgcctgtgttgcacaagaagtctcttcttacgccgtgtaggggaaaccctgcgtggcgtttttgtttttcacccgccgcctggaggcgccagcccccggggccggtgcggtgaaaaacagggagaggcggtatcccgcttccctgtgcagttttgagaaaaagggaatcctaaaaattattgcggaggagcggtggtatgattattctgggagatttgcagcttggtcacaaggatctggatacatggaagccaggtcccaacagcgcgggcggtgtcagtgtacagattatctttcaaaatgacacgcagaaaaccatcaaatacgtctactttgatgtggtcccctacaacgcggtgaaggatgcctaaagctgtaccatctccggcaagaccaaggccggactgaaatgtaccgggccgattcagccgggcaagattttccgggacgtatgttgggaaaatgtctggtacaactattccattacaacgctggacctggtcatggtggaggtcctctacatggacggcagctcggaaaagctcaccggagccaacatcaagtacggcgatcctcccggctgctacatagccactgcggtgtatggctcctatgactgcccccaggtgtggaccctgcggcgtttccgggatcataccctggccgcctcctggtacggccggaccttccttcatgcctactacgccgtcagccccacgctggtaaagtggttcggccggaccgcctggttccagaagctctggcggggccccctggaccggctggtggcaagactccgggacgagggcgtggcggacaccccctatcaggaccgggagtggtgaccccgaaaacaaatcctccccgttatcaaacggggaggatttttctgtctgtattgcgtttagacccgcttccagcttgcgccgcccttggtgtcgatgatctcgatgccctgggctttcaactcatcccggatgcggtccgcctccgcaaagttcttcgccttcttcgcctcgtaccgcgccagcaccagcgcatcgatggccgggtccccctcgccggtgacggtgtagccgctctcggtttgggtggtcttggcctgggcggcctccgcccgcttggccgccgccttctccagcaggcccagggacagcacgctgtcaaagtccccgatcagggccagcttggtggcgtcgttggtctttgccttcagcacgtcgaacagggccgtcacgcccatggaggtgttcaggtcgttgcccatctgctgcccgaacttctcccggtagggcttcatggcctcctggtccaccggaccgtccgccgggtctagggccgcgatgcgggcgatcagcttggtgtaggccgccgccgcgttgtccaggttctcccaggtgaacaccagcgccttgcggtagtggctctggaggcagaagtaccggtaggccagggggtcatagcccttctgctccagcaaggacacagtgagaaactcacccttggacttggacatcttgccgtccgaggtattcaggtgatggacgtggaaccactgggggcaccagggatggcccaggtagctctcgctctgagcgatctcgttggtgtggtgggggaaggcgttgtccacgccgccgcagtggagatccagatactccccattgtacttcagggagatgccggagcactcgatatgccaccccggataccctacgccccagggggaatcccacttcagggcctggtcctcgaacttgctcttggtgaaccagaggacgaagtcgttcttgttgcgcttgttgggatcctcctccacgccctcccggacgcctacggccaagtcctcctcgtcgtggtcgttgaagacgtagtaccgccccagcttggaggtgtcgaagtacacgttgccgccggcgaagtaggcatagccggtatccatcagcttggagacgatcttgatatactcgtcgatgcagccggtggcgggctggaccacatccggcgtcttgatattcagcctgcggcagtcctcaaagaaggcatcggtgtagaactgggcgatctccatgaccgtcttgtgctcccgcttggcgcccttgagcatcttgtcctcgccctcatcggcgtcggaggtcaggtggcccacgtcggtgatgttcatcacccggtggacatcatagccagtccagcggaggaacttctccagcacgtcctccatgatataactgcgcaggttgccgatgtgggcgaagtgatacactgtggggccgcaggtgtacatctccacgcggccgggggtgtgggtcttgaactcctctttcttgtgggtggccgaattgtacaggtacataaacactgctccttttacgtttccgaaccggcggattcctcccgccggctcttgagatattgttcatccatgagtttttccaaaaattccagacgggataaggctgcattcaacttttcctctacggggtcccggacgctgatctggtccacctcgtcggcgaaggtggcgatctttccggccactcggaccacatgggcggggacgcccacggcggtgcagtcctccggcaccgcgctgaggaccacggcgcccgcggcaatgcgggcgttgtcccccacggtgaaggggcccagtaccttggcgccggaacccaccatcacattgttgcccagggtggggtggcgcttgcccttgtccttgccggtgccccccagggtcaccccctggtagagcagacagtcgtctccgatctccgcagtctcgccgatgacaatgcccatgccgtggtcgatcaccagccggtggccgatggtggcgccggggtggatttcaatgccggtccagaaccggctccactgggagacgcaccgggccagaaagaatcgatgatgccggtacagccaatgggccacccggtggtacagaacggcatggacaccagggtacaggagaaaaatctcaagcttgctgcgggccgcggggtcgcggcgctggtaggcggccagcaggccgcccagtcgggttactcgttttgccatatcgaattgctccttgtgcggatcgggaggccatgaaaaacgcctcccgtaccaaggtacgagaggcgacggatcgcggttccactctcttttatcactcaaggaggcccgttgacgctggccagacggagggcttccacatcccccgcgctcccgggcgcacgttcacagctcccgccgcaggcgcgcttgcagccggtgacgcgccctctctgttctttggaagtgctgttactcttcccgatcaacacgctattccatttacgctttgtatcttaacaggatttgagagaggtgtcaagagacaacttcacgcaggaatatcccggccctgcgccctgcgccttgacagcgcacctgcttctccatacagaatatgccggaatgtggaaaccgtccccctgtcaacaggcggttgacaaaattccaatggctgtcgcttgccaagcgcccgccttttcggtatgatgggaccaaagaaaaggaggggatactccatggaattgaaggaccgtatcgctgccgtccgcaaagcggcgggattgacccaagagcagctgggcgagctgctgggtgtcacccggcaggccgtcagcaagtgggagagcggccagaccacgccggacgccgccaccatcgccgcgctgtgcgaaaagctccatgtgtcggccgactatgtgctgttgggaaaggagccgggggagggacagaccgccgcctatgagccgccggacacctgtccctgctgcgggcggaaggtctccggcagcatctgtccggaatgcggctatcagctgcccaatcatccgccccgtgggccccaatacgctgtcgttgccacccgccccggctttgtgcagagcacggagtcgtctgcccagctggtgaaatactgcggcttcacccaagaggatgccaacaatgccatcgcccactatgtgaacaaccagtcccgcatcctgctgcagcggggactggttgacagtgcggcccagtacattgccgcccatctggaccaggatttcttctgcccgcagatcgtagtggactgcggggaatccgaggaggcgctgctttacaaacccaaagccttcgagacaccgtctcccgtcaagagtcaagagggcatcggcttctggggcgtggtgggtgctgttatcgttgccctgctgatcctctcgttcttctgatgatggaccggtcctttctgcggcggtacgccgcctccggcgcggtcatcgccgggctgtatctcctgaaccgctttcttttggtccccctgaccagctgccgcctgctggcttggcacggggcggacttcctggccggcggcttgatgctgtgcctgctgaacggtctgctgtgtctcacccgccggcggccagtggagcgggccctgcctgcctcgcttttcctgctggcctgcggccttttctgggaagtggtcacgcctctgtacctgctccgatccgtgggcgacctccgggatgtcctggcggtgtggctggggggcgtggctctgctgtccctctggcgggtgtgggaccggctggggcctggaagctgaacatgtcaaaacgcccccggcgggagtgacccgccgggggctcgtctgttgtcagagtcacgccgaggcgatgacatccttgttcttcacgaaatactctacgccggagtacagggtggtgagggtgatgacccacacgcagagcgtgttcaccaccggtggaatgggcaggaacatcagcaccacgcacaccatagtggcggcagtcttgaccttgccggaccatccggcggcgatgacccgtcccttgtcgctggcgatcatccgcaggccgctgacggcgaactcccggcaaatgacaatgagcagcatccaggcgggcatctgcccgatctccacgaaccacagcatggcggcggtcaccagcatcttatccgccagggggtcggcaaacttgccgaagtccgtcaccaggttgtacttccgggcgatcttgccgtccagcatgtccgtgaggctggcgatgatgaagatggccagcgccacccacgtggcgccggggaagccccagtacagcaccaccatgaaaaccgggatcagaataatgcgcaaaagcgtcaatttattgggcaaattcatggatgtttactcctccgccaattctccggtcagttcgccgtccatgacgccggtaagccggacggtcacaaaggtgcccggttccacctcccggtccgcgtcaaaccagatgcggccgtcgatgtccggggactcggcgtagctgcggccgaagtgcatctgggcctggctgtcgaagccctcgcacagcacctcccgctccgttcccagaacagactcgttgtacgcgtcgatgatgtcggactgaacgtccaccaccagctccgcccggcggcgggcctcctccatgtccacatggtccatctgggccgcccgggtgccctcctccggggagaaggggaacaccccggcccgttcaatctttgtctcccggagaaagacacacagctcttccagctccgcctcgccctcgccgggcaggccggtgatgaggctggtccgcagcaccaggccggggatgcgggcccggagctttgtcagcaggtccagcagctccgccttggtatcccggcggttcatggccttcaggatcccgtcgttgcagtgctggatggggatgtccagatacttgacgatcttgggctcctccgcaatggtgtcgatcagctcctcagtgatctcgtccggatacagatagtggagccggacccagtggaagtccagcctgcacagctcccgcaggagagacgccagctggtgctcgccgttcaggtccgttccataccgggtgatatcctgggcgatgaccagcagctccttcacgccggcgtccgccagctccctggcctcttccagaaggccctccatggggcggctgcggtatttgccccgcagggaggggatcacacagtaggcgcagtggttgtcgcacccctcggcgatgcggaggtaggcataccaggggggcgtggacaggatgcgtcccccgtcctggggggcggtgtggatgctgcccaggtggcagggcctcaggccagaggcccccatcacctcgtcgatggcggcgcagatatcgccgtagctgccggtgcccagaatgccgtccacctccggcagctcgttcagaacgtcctgcttgtaccgctgggtcatgcagccggtgaccaggatcttctgtacctggccagcccgcttcagctccgccatctccagaatgttgtcgatggcctcctcgcaggcggactgcaggaagccgcaggtgttcaccaccaccacgtcggccccctccggctgggcctggatggtatggccggcggcctggacagaggccatcatctgctcgcagttcacctgattcttggcgcagcccagggagataaaggaaatgttatatggcacgatcgagtcctccaatcgatggattgttgcaaaatgggcccggcggggccggcatgtgtgtcccattggacagggaatgacagccatgatgtggctgggcagatacgcccacttgtaggagcaggcaccccataaccgccattcggcggcccgtatgcctccccggagggaatacccctgcgagacgggactcattcttcgagaatctccgctcccagacggctccatgcctcccggacgtctccccaagcaaacccccgccgcagcagtgcgctggtgagccgccgcttctccgcctcctctggggcccggccccggagcttggccgcaagaaatcggtcaatctgccaggcgctgtccggtgcctgatccagagcctcgtcccacagctcccggggtacgcctttctcccgcagtttctctcgaatgcgggccgggccataaccaaggccggcgcagtggcgcaccaagattgctgcgtaatctgcatcgttgatggcaccaatggcctccagccactcagcggcgtaccgcgcctccgcctgactggcccccttctcctggagcttccgctccaggtcgcggcggctcatggcccgcttgccgatgaggtccgccgccgtggccttcacgttggagacgctggcagccttcttcagctgctccagacgtctgccgtccaaatcatctccagtccgcaggccgaagtccagcgcctcctgctctgtgatcttcaggcaggcgccgtcctccaggaacaccagcacccggccctttttgtgggcagacgcctggacgcgctcaatccgcatcttcgaagtcgtcggcgctcacatccaccgcccggcctgccgccttggcggcgatgcgggactggttgctcatcagcttgtcgaagttccggcggatgtccgcctccagcttgtccgccgtctccgggttctcctggagataccgcttggcggcgtcccggccctggccgatgcgggtctccccgatggagaaccaggagccggacttctgcaccagctccagcttcacgcccaggtccagcagctcaccgaagtgggagattccctcgccgtacatgatgtcgaactccgcctcccggaaggggggcgccaccttgttcttcaccaccttggcacgggtccggttgcccacgatctcagaaccgtttttcagcgcctcgatccggcgcacatcgatgcggacggaggcgtagaacttcagcgcccggccgccggtggtcacctccgggttgccgtacatgatgcccaccttttcccgcagctggttgatgaagatgacgatgcagttggtcttgccgatggcgccggtgagcttccgcagggcctggctcatcagccgggcctgcaggcccacataactgtcgcccatttcgccctcgatctccgcccggggcaccagggccgccacggagtccaccaccaccacgtcaatggcgccggagcggaccagggcctcggtgatctccagcgcctgctcgccggtgtccggctgggcgatcagcatgtcctccacctggacgcccagtgcccgggcataggtggggtccagggcgtgctctgcgtccacaaaggccacctcgccgccccgcttctgggcctccgcgacgacgtgcagagccagggtggtcttgccggaggactccggcccgtagatctccacaatccgccccttgggcaggccgccgatgcccaaggccacgtccagggacagagagccggtggggatgtaatccacgttcagctccgccttgtcgccgaagcgcataatggcgcccttgccgtacatccgctcgatctgggccatggccgtgtcgatggcccgcttcttatcgtccgccggagccgcgttgggcagcggcgctttctctctcgccattgtattctcctcctgattctctataaaaactctttatttcaactcatctgtaagtcccttacttctctgagagagtccccagcagagggatccaaacagcatccctccatacacgatcaccgcgcggccgccaggcagcgtctcccggacagggtcccaatactcaggcgcataactggacgggcctgtttcaaccgctgcaaaaaggttaggtcaccgctgtggccgccatggaaagggctgacgccctatacgccgtataacgcggcttgggcgagtgcttaacgaaaccccggcgcatcagcgtccagcccgacaccaggggcccggcccacagcagggtcggacttcccgcctcctgcacataaaacggcagccccaccattgccgttcctttctctaaacgtcagagctctgtacacagcgttccgaataccacccgggggatgtcgtggtggtccttcaccacctggatatccccgaagccctgggtccgcatgatccgcagcacgttgtccgcttgaccgatgcccacttcaaaatacagacggccgccgggagccagggcctccttccacttctcggagatgctccggtagaagtccaggccgtcctcgccgccgtccagggccagatggggttcatagtccttgacggaggtgtccagcgtctcgatgtccgcccgggggatataggggggattggacacgatgcactggaactctcccagggatttctccggcttttcccgggcgtccgcctgcatgggcaccacccgggcggtaaggctgttgcggcggacgttctggcggcagatcttcagggccccgtcagaccactcccccagcaccacccgggcctggggcacttgggccgccaccgccagcccgatgcagccgctgccggcgcacaggtccagcacccggcattcccccaaggtcttgatatagccaatggcctgctccgccagcacctccgtgtccggccggggaatcagcacgtcccgggagatgtccagcgggagcccatagaactcccactcaccgataaggtatgccaccggctcgccctccagatgccgccgcaccaagtcccggacccggtgctccagctccggggaggcgtacagtcccccatcccgggccagctcctcccggctcttgttagtgccgaagcaaaccaactcccgggcctccagcgtggcctcctcgatccctgccctccgcagctgctggcggatatccaaatacaaattgttgtatgtcgtcgccataatacgcctcattatcaaaaattcaccattcgtctttccctttttcactgggcaagaccagctccagggaccggatggcgcactcgatcatggagtcgtccggctcattggtggtgaagttctgcatccacattccgggggccgtcaggattttggccagccgactgtcctgcacgtggcggcccacccagcggttgaactcataggtaatgcccaccaccagaggcagcagaatcagatgtgccagtgtccgcagccagacattggtgatgggccagatgccgaacaccacactggacaccaggatggacacaaagatcaccacgaacagaaagctggtgccgcaccggggatggtgccggggctgaatgcggacgttctccaccgtcaggggcagccccgcctcgtagcagaagatggtcttgtgctccgccccgtggtactggaacacccggtagatgtccttctgcttggagcagaagatcagatacagtaggaagatagccaccttcagcacgccttcgatcaggttccggccccacatggggaagtccgggaagaagtgcagcagcccgccggtgaggaaggtgggcagcaccagaaagaggaagatggacaggccgatacccagcagcacagagaggcccacgatcagcccctccagcttcttgttggaaaaggtccggtccagccactgttcaaatttggagggctccgtggtctcctcctccggatagaagtccgcggagtacatcagcgccttcacgccgttgaccatggaggagaggaagttgacggtgcctcggatcaggggccagcctaaaataggatgccggtccttgatgagccgcagctcctccaccttctctaccagattgccctcctggtcccggaccacgatggcctgcttctccgggccccgcatcagaatgccttcaatgagtgcctgtccgccgatgctggtgcggaaggcgcaggattggggttgttttgccatgtgtttcctttctaattccgtacagttgaattctaccatgctctgtgcagaaacgcaaacatttgttcgattttcggaaatcattccttgaccggcaggcagatggtgaccaccgcgccgccgccatcggcgttgccgatggtgaagatgccgttgtgaaggccgacgatctcatcgcacaccgcaaggccgatgccgctgccccgggccttggaggagcccttgtagaacttctgcttgatgaagggcagctccgcttccgggatgccgggaccgtagtcccggacccgaaccacctcaaactcgccctcccgactgatggaagtgtcgatccgcttgccggagccgccgtgcttggcggcgttgtccagcacgttgcagaacacctgcttcagccgctcagagtcgccggggatgggaggcaggtcctcatccccgcactcgtagttcagtttgatgccctcctgccggaacagctcgccgtaggtgaagatggcgtcctcaaactccgcctgcaggtccacctgctccatccggagggtgaatcggccgtcctccatcttggagaattccagcagctcctctaccatggtagagagccgccgggcctcgttcagaatgatgcggatgccgcggcgcatctgggcggggtcatctgtggtgtcctccagaatcgtctcgccccagccgttgatggcagtgaggggcgtccgcagctcgtgggacacggaggagatgaactcggatttcatcttctcgttctggccgatcttgagggacatatcgttgatgttgtccaccagttcccccagctcgtccgtgtacttgttttcgatctggaagccatagctcccggcagagatccgcttggccgcctcagacaccacggccaccggctccaccacgttgttgatgaacagcaggctggagatcagcaccagggccatgcagatgcctcccaccgccagaatgataaagaccaccaggacaatctgccggtccaccagcttcatggacgtcaccagccgcatgacgcccgccacccggccgttgaacaacaggggcgctgagaccgccatgatcttctcacccgtctccgggtctctgccttggaagggcgtgatctcctgattggtgatggctctggtaatatcgctggtacccggcgagctgcctgctgtcaggccggaggtggacatctggatacgtccggtgctgccgatgaactgcagctcaatccgggacttgtcctcataggtgtccactgcctgggtcgccatctggttgtactcggagtagctgttcatgaagtagtcgttgaaagcactggacatggcctccgcctgcttcatcaggccgttttccatgctgctgtaatagtaggtggaaacgcccacagataccagcgtcaccagcagcatcagcagcaccagcaccggcagaatggtattgacgatccaccgcttccgcaggccccggaggcgcagcaccgtccatttccgatcccgttcttcctctgccatgggccgctcctcctttccctgcgttccttacgccggcatcactggccggccgattttctcagaacccccacttgtatccgtatccccacaccgtggtgatatacgtgggattctgcacgttgcttcccatcccgcggcgcgggatgggacccctttcctcagcttgcgcggcggaagtaaattccaccttgcgccaaggttttggcttccgccaaaacgcttgtacgggccatcggcccgccccgctccgcggggccccggacaacgcccggagccgctcagaacccccacttgtatccgtatccccacaccgtggtgatgtacgtgggattctgcacgttgcttcccatcccgcggcgcgggatgggacccctttcctcagcttgcgcggcggaagtaaattccaccttgcgccaaggttttggcttccgccaaaacgcttgtacgggccatcggcccgccccgctccgcggggccccggacaacgcccggagccgctcagaacccccacttgtatccgtatccccacaccgtggtgatgtacgtgggattctgcacgttgcttcccatcccgcggcgcgggatgggacccctttcctcagcttgcgcggcggaagtaaattccaccttgcgccaaggttttggcttccgccaaaacgcttgtacgggccatcggcccgccccgctccgcggggccccggacaacgcccggagccgctcagaacccccacttgtatccgtatccccacaccgtggtgatgtacgtgggattctgcacgttgtcctcgatcttcagccgcaggcggcggatgttgacatccacgatcttcagctcaccgaagtagtcccggccccagaccatatccaggatctcctcccgggagagggccttgcccggattttccatgaacaccttcatgatggaatactccacctgggtcagcttgattcgctggccgttcttctccagcgtccggttgcgggtgttcagcaggaagggatcctgccgaatctccccggtctgggggatctcctctccgccggcccggcggaacagggcgtccacacgggcggtaagctctgccggggagaagggcttggtcacatagtcgtcggcgccggtcatcagtcccgtcaccttgtccatctcctgggaacgggcggtgagcatgatgataccgattttggtgttggtggcccggatgcggcggcagacctcaaaaccgtcgatccccggcagcatgatgtccagcagcgccacccgggtatcggggttctccttcagcttgtccagtgcctcttcgccggtctccgcctcaatgacgtcgtacccggcacggcgcaggttgatgacgataaagctgcggatgctggactcatcctccagcaccattacttttttcattcggcataccgtcctttcttctctgtcagctgtcgccggcggaccactccgtggtgatcaggctgaacgcctcccgcacctcgtcttccgtcaggccgtattcccagctcccatttgcgtccagaagctcggccgtgtagatgatctccggcagacggcgcaggatgacccggccgccccgggtagctctggcctcgcggccggagcctgtgagcttggtgatccgcaggacatcctgtggtggctccccgctgtctccccggtaagagaatgtgaccgtgacctcctccgtcccggccgtgcgggtaatgaggatctgatccttccacacgtccggcaggcgcaggtaccagccgtcctccacactgtggtaggtgctcaccacagccgctttggtgccgtcgctggtataggtataccagtcgatccgccggcaggggtcctcacccacgtttccccaggccgggatcggctcgggatgggggacctctgtgataccgtcgccgttgatatcctccgggtacagggaactgaagggcgcgatctccgaagacacccccgtcacgtcggacagcaggatgttcaccagttctccatttttcacggtcaggatgtcagtgaccatccaggccgactcctccacccccgtgacgaacagggccggcgtaccgtcctgtaggacaccgctcttcacacgcccctgctggctcagctccgccatggtgctggtgatccgtgcggaggttcgcagctggaactcttcctcctgccagcagtagtaatccgcaatgccgttgccctcctcatcggcccggagcaccaccagctcccacaggccatcctgattcagatcgttgaccgcatatttcacatagctggtgccctgcaccagctcctccggctccccggaccgcagggtgtagacggagagggccaggaggtccgtattgacccgccagcccaccagcagctccttccggccgtcctggtccagatcctcgtaggcaatgctgtaaatgctggtgccggtgccctcaatgacggcagcctgctcatatccctgctttccggcggtaaagatatagatcttcaggggcttctcatccgcagagttgcggaagaaggccagcgcctcctcctcgccgtctccgtccagatcctccagctgcacgggctggatgttgctgccggagacgggggccgcgtactccgccccgctctccagcagctggttgagtgagctgttcagctccgtgtactcctccggcagctgcggcaggctgtacaggtccgtgggggaaaaggaaaatccgcagccgctggcggacagaagcagaagcaggccgaccgctgccgtcagcatccgctgtattcgctgtctcatggcctcctcctctctgccggtgggctgcccccgccgaaaaacgcataattcaacttatatatgatagcacgttttctccctgatgtgtaggggttgtcagcatttttcccgcattttacgttctgttcatttttccgccgtccccggtcggaaggccgcgatcagggccagcttccgcctgcgatccagccgtttgatggcggcctcccgccgcagggccgcagaccggtccggcaccgcctcctggtagaccagctccaccggcaggcggctgcgggtgtacttggcgccccgcccgctttggtgggcctggaggcggcggggcaggtcgttggtgcagcctgtgtacagtgtgccgtccccgcagcgcaggatgtagaccagatagcccataccgtccctcctctgtccgatgagaccagtataccacagcccgccgccccgtcaaagggctttccgcatggggacttccctgcccggcataggaatgatggtacagggagggattctatgttgtctgccgcactgctgctcttcgccaacacgctgctcttctcactccgcctgtccggcggcgggtcgtttccaaagccgctgtccgccgcagaggagcgggaatatctccgccgctacgcccagggagatcaggaggcccgggatgtactcatcgagcggaacctgcgcctggtggcccacatcatcaagaaatactatacccagagcgccgatcaggaggacctgatctccatcggcaccatcggcctcatcaagggcatctccagcttcgacccggagaagggcgcccgcctggccacctacgccgcccgctgcattgaaaacgaaattctcatgtacttccgcagccagaaaaagctccagggagaagtctctctgtcggattccattgagacagacaaggagggcaatgccctccagctgatggatgtggtgggcgtggatgacaccatgctggacgatatccacgaccgggacagcgcgctccggctccaccagatcatccgggagcgtctgaccacccgggaggcggagatcattcgcctgcggtacgggctgggcggcaccatccccctgacccagagggaaattgccgcctccttcgggatttcccggtcctatgtatcccgcatcgaaaagcgggcgctggaaaagctgcgccaggagctgcaggacggccctgcgccccagctggtccggcggaggccccattcctccgggacgtgaccgccggatttggaaaacagagggcgtgatggaaaatttccatcacgccctttctttgcgcgcttccgcgcctttcaatagcgccgcaccacggcggccaccttgcccaatatctgggcataggtgccgtcaatgggggaatatgcctcattctccggcagcagccatacctgaccgcttttcagagacaggcgcttaaccgtcgcctcgtcatcgatcagagccaccacaatctcaccgtgctgcgcagtgggctggctgtgaaccaccaccaggtcgccgggcaggatgcctgcgttcagcatggactcgccccggacccgcagggcaaaatactccccgggccgaccggcggtatcgaaggtcaaatagtcctcgatacactcctccgccagaatggggctgccggccgccacattgcccaccactgggacctgattttcaggcttaggagattcccgcagcgtgatggcgcggcccttgccggcgcccttttcaatgacgcctgcctcctcaagccgtttgaggtgaaaatggactgtggagggtgacttcagccccacggcctccccgatctcccgcaccgagggggggtagccctgctcccggatacaggcggcaatgtactcgtagattttctgctgcatctttgagagctcccgcatacgtgtccacctccgctggatttctggctgtattataccacaacgccgcaggaaaagcaaacatttgttccatcattttcaaacttttttgtcgtctgtccgtacgcttccgcatagctttgatttgtctgcttttttgcaaaatccccttgaaatacagagaaaactatggtatcattaacatctgtgaaatcatgatccatgcgctgcatggctgaaagttttggaggttatcctgtatggacgctttaacgctcgtcatcacgatcctgcagcttctctgcggtctggcagtcattgtcatcgtgctcttccagtccggcaagagcgccggcctctccggtgccatcggcggtgtggccgactccttcctgtcccgcaacaaggccaagactctggacgccaagctggcccgcgccaccaaatgggttggggccatcttcctgatcctgacgctggtcctgctgatcctgcagggctgatttcgcgctgaaagcgcccggtgtgccagcacaccgggcgcttttttatatgtcgccggagcagtacagcacaccggcctccggttggataccgttggcttccagcagttcctgcaccgtcacgaagcggtagccttccccttgaagcgtatctacaatctccagtgccgcgtccacagaggtatcgtagatatcatggagcaggatgatctgattgggggccgcattttccaggaccgccgccttcacctgggctgtattgagcttttcccagtccctgggatcgatggaccactttatcatgggcacctgcagcagctcccggtccgccgcatccacggccccgtatggcgggcggagccaatatggcccccctcccagcaacgcttccagcgtctcctctgtacggcctacctcccgctgcagcgtctcccgggagatcccctgaagccgtacatggttccaggtgtggctgcccacctgatggccctctgcctgcatccgccggaccaggtcctcattgccttcgatctgcttgccaatcaggaaaaaggtggcgcttgccccccgctcctgcaggccgtccagtagccgctcggtagtgttccggcgtgggccgtcgtcaaatgtaatggcgatcagcttgtccgccgggagctgggcatctgccccagcctccgccacagggccgcccggcgcgcagccggacagcagtgccagggcaaggcacagaaaaaacaggcgacctctccacatcgcgcccacacctcctcattcatgcagcggtagtttgcgcggcagctgaaaatttacacccgttaaaattttctcctgttttttcataacacgaaaaaaggaagcgggccccgcccgcttccttcatctcatattccgttcggtgctctgcatagacggtcaggagaacaggtcagaaatggcatctcccaccaggtccactgccagatctgacaccacttccagtcccagaagcactcccccctccttggcagctgaatgggctctctttcgcccgcgtgctgcgggcttctccctctgctgaaattccggtttcttctcgagctgcggcgcgtctccgtcccctgcaggctgattgaaggccccgcaccgggggcagaagccgtctgcatcgcaatcataccgtttgccgcacgaagcgcaggaaatcttcttcacagatgttccctcctttgctctgctgccgggcgctcacaagtccccgccgggcagccgtcgaccgtgggactgctccttcagcagccggcccatggccatctctgcctgacggagattttctcccagttcccgctggagcctccctgtccgcttctgctgtgccgcaggggactcagcggccgcggcggtcccgccgctccggacccagacaggctggttgaaggccccgcaccgggggcagaagccatccacatcgtagtcataccgctttccgcagtcctcacagtgaaccatgcgcatagagatctcccccttcgcttccattgtatcacatctccttcaggtccacaagaacaatcaaaagccctttgtcacaggtcctaggttcccatgacaaagggcttttttgattgcgggttcttacttcaccagctcgatgatggcggtctccgcggcatctccgcggcgcacgccggtgcggatcacgcgggtgtagccgccgttgcgctctgcatagctgggagcgatctccttgaacagcttcttgcagacatcctcgcgggtgatgaagctcatagcctgccgataagcggccaggtcgctcttcttgccgagggtaatcatcttctcagccagaggcttgatctccttggcgcgggcaagagtggtctccatcttgccgttgtccaggaaatccgtcacctgctgacgcagcatcgccatgcgctggtcagtgggcttgccaagtttccgagttccgggcattttggtttcctccttatcaggattttggtcagccggggaacgtccgccggcattggaatcagttgttgttatcttcgtcagccagatggagtcccatcatcgccagcttgttgatgacctcttccagggacttgcggcccaggttgcggaccttcatcatctcgtcctccgtcttggaaatcaaatcctccacggtgttgatgttggcacgcttgaggcagttgaagctgcggacggagagatccagctcttcgatggtcagctccagcaccttgtcccgctgggcctccgccttctccactacggtgggcttgctgcccacgttctcagagaggtcggtaaacagcgtgaagtggtcgcacaggatcttcgcacccaaggacacggcgtcccgggcagagatggtcccgtcggtccagacctccagcgtcagcttgtcgaagtcgctggaagcacccacacgggtgggctccacggtgtagttgaccttatacacgggggtgtagatggagtccacggcgatgacgccgatcacgttctgctgcggcttgttgcggtccgcaggcacatagccgcgtccgtgggacagggtgatctccatgttcagcgtcgcgccgttgtccagcgtggcaatgtgcatgtcgggattcaggacctccacctcgccgtcggccttgatatcgccggccttgacctcgcaggggcccaccgcctcgatgtagaccgtcttcaccgtctcgcagtggagcttggtgagcaggcccttcacattcaggacgatctccgtcacgtcttccttgacacctgggatggtggagaactcatgctgcacgccggcgatcttgatggtggtcggggccgtgccgggcagagaggaaagcataatgcggcgaagcgcattgcccaaagtggtgccgtagccgcgctccagcggttccaccacatacttgccgtatgtggcgtcccccggcgtctcgatgcactcaatctggggcttttcaatttcgatcatgcagtagtaccctccttcatcttcttgttgcgagcacgcatgattgcgcgccgccggcagttcctatcattattgagggtatcctccgcttacttggagtacaactcaacgatgaggtgctcctcgacgggaacgtcgatgtcctcccgggcgggcagacgggtcacggtgcccttcagggcgttcttctcacgctccatccaggcggggatcaggaacacgggggcatcctggcccagcaggcgcttgaagatctcagaggagcggctggactcggcaacctcgatcacatcgccggccttgacctgataggacggaatgtcgaccttccggccgttgacggtgaagtgggcgtggctcaccagctgacgggcctgacggcgggtcatggcgaagcccatgcggtataccacgttgtccagacggcgctccacagcgatcagcaggttgtcgccggtcttgccgggggtcttggcggccgcctcgtaataggcgtggaactgcttctccagaatgccatagatgaacttgaccttctgcttctcattcagctggatgccatattcgctcttcttctttctcatctggccgccggggttgcgattggtctccttcttcgcatagcccatcacggcaggagaaatgcccagagccttgcagcgcttcgcgatcggctgcatattcttagccatttgcttgttacctcctcttcaaatcagacacggcggcgcttgggggggcggcagccattgtgggggatgggcgtgacgtccttgatcatggtcacttccaggcccacggcctgcagcgcccggatcgcggcctcacggccctggccggggcccttgacgaagacctcgacggtcttcaggccatgctccatagcggcgcgggcggccgtctcagccgcggtctgtgccgcgaagggggtggacttcttgctgccgcggaaaccgaggccgccggaggaagcccaggagatcgcgttgccctgtgtatcggtaacagttaccatggtgttgttgaacgaagagcggatatggacctggccccgctcaatgttcttccgttcacgccggcggcgaatgaccttcttgccggcggatgcctttgcagttgccatcttggttctccctccttacttcttcttgttggcaatggtcttcttgggacctttgcgggtccgcgcattggtcttgctgcgctggccgcgcacgggcagacccttgcggtggcgaatgccgcgatagcagccgatctcggtcagccgcttgatgtccagagcggtctggcggcgcaggtcgccctcaacggtatagctgtcgatggcgtcgcgcagcttctgctcgtcggcgtcggacagatccttcacgcgggtgtcggggttgacgcctgtctgcgccaggatgtccttggcgctctttctgccaatgccgtagatataagtgaggccgatctcgatacgcttatccttcggcaggtcaataccggcaatacgtgccatactctcaaagcacctccaattaaatgttagccctgtctctgcttatgcttggggttctcgcaaatgaccatgacacggcctttgcggcgaatgaccttgcacttctcgcacatgggctttacggacggtcttactttcatagtttttaaccattcctttcagcggtttgtgtcttttcagctcaagtggcgcttacttactgcgccaggtgatccggccgcgggtcaggtcatacggggacatctccaccgtcaccttgtcgccgggcagaatcctgatgaaattcattctgagttttccggaaatatgtgccaaaatcttgtgtccatttccaatgtctacctggaacgttgtgttgggcagggcttccaccacgacaccctccacttcaatcatgtcggattttgccaaacgttatccctcctggtccggataaacctcctcgcggtaagccgcaagggttttgcgaagctcgctgttggtgatcctggcttcgcctctgatcttttcagaaagccggttctcgtccgccgctacaaacagcacgtgtctgcgctttttgcgtttgggcgactccaccttcctggatttcccgtccgccagcagcaggtactccccctccaccgcgagaacgatgaagagctttccctggtcccggccggcaacggatcttacgatgttggatgctgcaatttccatgcgtttcctctcagatggcgggggccgtcaggatctcaggctcgccgtccgtgatcagaatggaattttcatagtgggccgcccatttgccgtccagcgtcttgacggtccagccgtcgctcatctgctggatggccgccgagccggcgttcaccatgggttcgattgcaagcgtcatgccgcggaggagcctgggcccccggccgggatggccgtaattggggatctccggcgactcgtgcatctgggcgccgacaccgtggccgacgtattcccggacgatggagtagtcgtgactctccacgtactgctggatggctgccgagatatcgaacagccggtagccctccttggcaaacctgattccctcaaaaaagctctgtctggtcacgtcgatcagatcctgcgcctccggggagatcctgccgcaggggaaggtggccgcacagtcgccgtgaaaccctccaatgtacgctcccacatccacactgacgatatcgccctcctggaggacccggggtccgggaattccgtggatgatctcgtcgttgacgctgatgcaggcgctggccggatagccgttgtaatgcaggaaggaggggactgcgccttgcttgcgaatgaaatgctccactgcacggtcgatctcatgggttgtgacgccgggctttaccaattcccctgcataagcacgggcagccgcggtaatttttccggcccggcgcatcaattcgatctcatggggggatttgagtgtaatcatacgctcatctccccagtgcgtggaggatggcccgggaggtctcttccacagagggctgattctccacaggcttcaggagtccccgctgggcatagaagtccttcagcggctcggtctccttatgatagacctcgagccgcgccttgacggtctcgggggcatcatctttccgctggaccagcttaccgccgcacttgtcgcacacgccctcctgcttggggggcacagctaccatgtggtagctggccccgcaggattcgcagacacggcggccgctcatccgctccatgatggtctcgtcagagatctcaatagagatcacgtcgtcaaatgtgatcccggccttttccagggccgcggcctgggcgatggtgcggggcaccccgtccaggatatagccgttcttgcagtcatcctctgccagccgctccgtgacgatgccgatgatgacgtcgtccggcaccagctggccggcgtccatataggacttggccttcaggccggtgggcgtgccgtttttgatggccgcccggaggatgttgcctgtggaaatggtgggaatactcagttctctgcacaggatttccgcctgtgttcccttaccggcgccgggggcgcccaacaggatcagcttcaattgaaacgccttctctcttattccaggaagcccttgtactgacgcatcagcatctgggcctccagcgccttgacagtctccagagccacgccgaccacgatgatgacggaggtgccgccgatcgccagataagcgttgccgacagccttacccagcagcagcgggcagatcgccacgatgcccagataaatggcgccgaacagggtgatcttgctcaggactttcttgatgaagtccacagtgggcttgccgggacggaatcccgggataaagccgccctgcttcttcaggttgttggcgatctccaccggattgaactggatggtggagtagaaatagctgaaaccgatgatcatgatgaaatacacgatcatatagatgaaggactgggtatcgatggcgtcgtagattgcccgggaaaccgtctcctcctcgggaataccgatgaaggtccagatcgtcacgggcagagacgcgatgctctgggcgaagatgatgggcagaacgccggacatattcaccttcatggggaggtgagagctctggccgccgtacatcttccggcccacctgccgcttggcatactggacgggaatgcggcgctctgcgtcgctgatgaacacgacgaacacaaccagcgccaggacgcccaccagcagcaacaccaccagagccgggtgcagcgcaccgtccgcggcagcgccgccgttggcccagctcaccacgccgctgtacagagagctgacagaggtggggatccgggacaggatgccggcgaacagaatgatggaaatgccgttgccgatgccgaactccgtcacctgctcgcccatccacatgacgaaggaggagccggcgatgaaggacacgacgatgaccagtgcgggccagatgccggtggcatcagatgccagcaggttgtagttgcgcatcatgaaatagtagccgaccgcctgcaggatggcgatgccgacagtggtatagcgggtgatggactggatcttcttccgtccctcttcaccgccatccttggccagccgctccagggccgggatggccacagtcagcagctggatgatgatggatgcgttgatatagggctggatgctcagggcgaagaccgttgcctgggcaaaggcgccgccggacatcacgttgtacaggcccagaatggtgccgcccatctgatccagataggtctccagcaggccgacatccacgtaaggcaccgtgatggcgttgccgatccggaagatcaacaggatgaggagtgtaaaaatgatcttcttccgcagttcggggatgccccacgctttgcgaatggtttggatcacgttacatcacctcggcctttccgcctgctgcctcgatagcctccttggcagaagcggagaaagcagaagcctggacagtgagcttcttggacagcttgccgctgcccagaaccttgtagccgtagcggcacttggagaggatacccttctccagcagcgcgtggaccgtgacagtatcgccgtcctggaactgatccagggtgctgagattcacgatctccaggggctttgcgaagatgttgttgaagccgcgcttggggatgcggcgggccagaggcatctggccgccttcaaagccaacacggatcttgccgccggagcgggccttctggcccttgtgaccgcggccgccggtctttccgttgccggagccggcgccccggcccttccggtacggggcccggacggagccctcggcgggagacagttcgctcaacttcataattccgtgcctccttatttcacttctgtgacctgcagcaggtagccgatcttggcgatcttgccgcgggtctggtcgttgtcgggctgcacggtgatgtcaccgatcttgcgcaggcccatggaatgagcggtggcgacctgtttttccaggcggccgttcaggctcttgacgagcttaatatttaagtttgccatttttgcgcctccttaacccacgatctcttcgacgctcttgccgcggatgcgggcgacctcctcgggaccgcgcatgctcttgaggccctcgaaggcggcggcgacaacgttgttggggttgttggaacgcaggcacttggtccggatatccttgatgcctgcggcctcgacgacggcacgcacagcgccgccggcgatcacgccggtaccgggggcagcgggcttcatcagcacgcggccggcaccggcctcaccgatggtctcatggggcacagtggtgccggagagggtcacggtgatcatgttcttcttggcggcttcgatgcccttgcggatggcctcggggacctcagcggccttgcccaggccatagcccaccttgcccttgccgtcgcccacgacgaccaaggcggagaatttcatcacacggccgcccttgacggtcttggagacgcggttcagggaaacgaccttctcgatatactcgctctgttctctttcaaatctaggcatgttgtcgttcctcctcccttagaatttcaggccgccctcgcgggcaccctcagccagagccttcacgcggccgtggtacagatagccgccgcggtcaaacacgacagtctcgatacccttggccttggcgcgctcggccaccagcttgccaacggcagtggcagcggcgatattgccgccgtaaccttcgatggccttgtccagggaggaagcggaagccagggtcacgccgttgacatcatcgatgacctgggcgtagatgttggcctcgctgcggaacacattcagacgcggcatctcaggggtgccggagatcttggcgcgcactctcttgtggcgcttcaggcgctgggcgttggtattcggtctcttaatcatatcggcacacctccttacttcttggcgccggtcttaccgaccttgcggcggatgacttcatcggcgtacttgatgcccttgcccttataaggctcgggaggacgcttctcgcggacctcggccgcaaactggccgacagcctgcttgtcgcatccgttgatgacgattttattgggagcggggacatcgatggtgatgccctcgatctcagaaacgatcacctggtgagagaagcccaggttcatgaccaggttcttaccctccttggccacacggtagccgacgccgttaacctccagctccttcttgtagccgtcggtcacaccgacgatcatgttatggagcagagtgcgggtcaggccgtggaggctgcggtgcagcttgtcgtcggaaggacgctccacggtgatcgtgctgccttcctgtttaagaatcatctcagggcgcagagccttcgtcagctcgcccttgggtcccttaacggtcaccacattaccctcggcgacattgacggtgacgccggcgggaacggtaatgggcattctgccaattctagacatggtccaataccctccttaccaaacgaatgccaggacctcgccgccgacatggagctcgcgggccttcttgtcggtcatgacgcccttggacgtagagatgatagcgatgcccaggccgcggagcacgcggggcagctcgtcggcgcccacatagacgcgcaggccgggcttggagacgcggcgcaggccggtgataaccttttccttgcccgcgttgtacttcagggagatgtggatgacaccctgggttccgtcctccaccacctggaagttcttgatatagccctcatccagcagaatctgagcgatgctcttcttcatgttggaggcgggaacatcaacggtgtcgtgcttggcgttgttggcgttgcggatgcgggtcagcatatccgcaaccggatcggtgatatgcataataaatcctcctattttagagttgcggctctctcgagaccgctgcggcagcgaggtatcatggcgaatggagcagtccgctcgcgcgtggtgcccaattcgtcatgacctttcgccatccgatctgccaaaggctccatatcaaaagcccgtggtcacaaaatttggttgcgcggggcgcctctcagaaggaggccttccgcacgccggggatctcgcccttgtaggccagttcccggaagcagatacggcagacgccgtagtcacgcagataggcgtgggggcggccgcacagcttgcagcggttgtatctccgggaggagaacttgggagcccgctgctgcttgagaatcatggatttctttgccatcgtttcttcctccttagcgggcgaagggagcgccgacctgctccagcagggcgcgggcctcttcatcggtgtgcgcggtggtgcagatgaccacatccatgccgcggatcttgtcgatcttgtcgtactcgatctcggggaagatcagctgctccttgatgcccagggcatagttgccgcggccgtcgaaggagttggggttgatgccctggaaatcacggacgcggggcagggccacgttgaacaggcggtccaggaactcccacatcttgtcgccccgcagggtgaccttggcgccgatgggcatatcctcacgcagcttgaagtttgcgatggacttgcgggcccgggtaatgacgggcttctggccggtaatctggctcagatcgcccaccacgttctccagaaccttggagttttcacgcgcctcaccgcagcccacgttcacgaccaccttgtcgatcttggggatctgcatgacgctcttgtagccgaactgcttcatcagggcgggagcgacttcggcagtgtatttttctttcagtctggccatttgtcagctctcctttctcacagctcagcgccgcagtgcttgcacacgcgggtcttcttgccgccctcgatcttgtgggcgacgcgggtgcccttgctgcacttggggcacaccacctgcaccttgcaggcggcaatggcggcctcgcgcttcatgatgccgccctcttcgccctgcttgcggggcttgacgtggcaggtcaccatgttgatgccctccacgacaaccttcagggagccgggaacggtgcccagcaccttgccctgcttgcccttgtccttgccggacaggacgacaacggtatcgcccttcttaatgttcatagccatttcgctgccctcctcaaatcacttcgggagcgagggacaggatcttcatgtaatccttgtcgcgcagctcacgagcaaccggcccgaagatacgggtgcctctggggttcttgtcatccttgatcaggacggcggcattgtcgtcgaaacggacataggtgccgtccgcccggcggacgcccttggcgctgcggacgatcacggccttgacaacctcgcccttcttcaccgtgccgccgggggtggacttgcggacggacgcgacgatcacatcgccgatgttgccgaacttccgcttggagccgcccaggacacggatgcacttgatctccttggcgccggtattatcggccaccttcagaaatgtttcctgctgaatcataacggcacctccttacttcgctttttcaatgatctcgaccacgcgccaccgcttgtccttggacagggggcgggtctccatcactttgacccggtcgccgatgccgcaggcattctcctcgtcatgggccttcagcttgtaagtgcggccgacgatcttcttgtacaggggatgggccacacggtcttcaatggcgacgaccacggtcttgtccatcttgtcggatacgactctgccgacccgggtcttgcgggaggaagttctcttctcttcgttcatgttcgattccctccttcttactgcttgtcagaagctccggagagctccttttgacgcaacatggtcttgactcgggcaatgtcatgcttggtctcccggatcttcaggggattatccagctgattggtggcgtgctgcatacgcagatagaaaagatccttcttcaggcccaccagcttctcgttgagctgctcgggggtcatgctacgaatttcacttgccttcatcttcactcacctgcttcctcggtgcgggcgacgatcttcgtcttgatgggcagcttgtggctggccagacgaagcgcctcgcgggcaacttcttcagacacgccggcgatctcgaacatgatgcggccgggcttcacgacggcaacccagaactcgggggaacccttaccggaacccatgcgggtctcagcgggcttcttggtcacgggcttgtcggggaaaatcttgatccaaacctgaccgccacgcttggtgtagcgggtcatggcgatacgggccgcctcgatctgattgctggtgatccaggcgggctccagggcctgcaggccgaactcaccgtaggcaatggtgttgccgcgggtggccttgccggtcatacggccgcggtgtacgcggcgatacttgactctcttcggcagaagcattactgggctcctccttccttagcgggtgccgcaggcgccgcgggggcagccggacggctgggattggtggcacggttgaaaccgccctgggggcggccctggccgcggttgaaaccgccctgacggtcacggttaaacccgccgccctggcgccggtcgccgaaaccgccgcggcggtcgccatcccggcggggacgacgctcacgacgctcctggtagggcttggaggtgtccatggtgcggggggtggtgcgcagggtctgagagaggacctctcccttgtagatccagaccttcacgccgatgcggccgaaggtggtggcagcctccgcgaagccgtactcaatgtcggcgcggatggtctgcagggggatggtgccctcgtgatagtgctccacgccggcgatctcacgtccgcccagacggccggagcagcaaaccttgatgcccttggcgccggcgcgcatggcgcgggccatggcgttcttcatggcgcggcggtgagagatacgcttctccaactgctgggcgatgttctccgccaccagctgggcgttcatgtcggggttgcggacctcgacgatgttcaggcgcaccttcttgccgatcagcttctccacagcgagacgatactgctcgatctgctcgccgcccttgccgatgaccatgcccggccgggcgcagtggaggaagatggtgacgacttcgttgctccgctcgatctcgatcttgggaacaccggcgccgtacagggtcttcttcaggtacttgcggatcttctgatcctcgacgatcagatcgccgaccttctcatcactggcataccaacgggaatcccagtctttgatgacgcccacgcgcaggccgtggggatttactttctgtcccataaaactgttctcctccctcttatgccttttccgtcacagccagggtgacgtgagaagtcttcttattgatccgataggcgcggccctgagcccggggcatcatccgcttcaggatggggccgggagtggcgaacacctcggacaccaccagcttggcggggtccatgccgaagttgttctcggcattggcacaggcggacttcaggagcttcatcagaggctcggaagcggccttgggggtctgcatcaggatcgccatggcggtgccggcgtccttgccgcggatcagatcacacacgatctggaccttgcggggagcgatgcggacatagcgcagatacgctttggcaatcttcatctcttccatgttctgcatcctccttcattaagaatctttccgatggccgcggaaggtgcgggtgggcgcgaactcacccagcttgtggccgaccatatcctcctggatatagacgggcacgtgcttgcggccgtcgtgaacggcaatggtgtggcccacgaaggcggggaagatggtagagctccggctccaggtcttgaggaccttcttctcgttcttcgcgttcatttcctcgacccgcttcagaagctccggggcaacatacgggccttttttaatggatctgctcatattgacttgcctccttacttctcgttgcggcgcttgacgatgaatttattggtggggttcttgcccttgcgggtcttgtaacccatggcgggcttgccccagggggtcaccgggccgggacggccgacgggtgcgcggccctcgccgccgccgtgggggtggtcattggggttcatgacggagccgcgcacggtgggacgccagcccatgtgacgcttgcggccggccttgccgatgttgatgttctcgtgctcgatgttgccaacctgaccgatggtggcgtagcagttggtgcgcacgatgcggacctcgccggaaggcagacggatctgggcgtcgccgccctccttggccatcagctgagcggcggtgccggcggagcgcaccagctgggcgccgttgccgggatgcagctcgatgttatggatcacggtaccaacggggatgttggcgatgggcagggcgttgccgggcagaatgtccgcctcggggccggtcatgatcttgtggccggccttcaggcccaggggcgccaggatatagcgcttctcgccgtcctcatactggatcagagcgatgttggcgctgcggttgggatcgtactccaggcgcagcacggtggcggagccgatcttgtcccgcttgaagtcaatgatacggtacttgcgcttgttgccgccgccgcggtggcggacggtgatgcggccgtagctgttgcggccggagctcttcttcaggggctcagtcaggctgggctcgggcttcgccttcttgtcgatgccgtcgaacccggagaccgtcatctgccgtctggagggagtcgtcggcttaaaagttttgatagacatgtcgcgttacactccttccgtttatcagaccataccttcgaagaactcgatggtcttggaatccgccgccagctggacataggcctttttccaggtcttggtcatgccgggacggccggcacccatgcgcttctccttgccgggcaccgtcagggtgttgacagaggcaaccttcacaccgaagatctcctccaccgccttcttgatctcgatcttgccggcgtccttggccacctcgaagacgtacttcttgtcggcggcaccggacatggcgcgctcggtgatgatggggcggatgataatatcgtaagcggtagccattacgcgtacacctcctcgatttttgcgagggcgtccttgtccacgaccagatacttggcgttcaggatgtcatagacgctcaggatggaagcgggagtggtcacaacgccggggatgttccgcgcgctcttgacgatggtctgatccacggcgggggtgaccaccatggccttgccgtccacaccgacggcggtgaggaacttgcggaagtcagcggtcttgatggcgtccatcttgatggagtcgatgaccaccatctggccctcggccaccttggcggagaggacggacttcagcgccaggcgcttgaccttcttattcagcacatagctgtaatcccggggcttgggggcaaacacgatgccgccgtgggtccactggggagcacgggtgctgccctgccgggcgtggccggtgcccttctgacgccagggctttctgccgccgccggagacttcggcgcgggtgagggcgctctgggtaccctgtctgcagttggcgaggtggttcttgacaacctcgtgcacgacggtctggttgggctcgatgccgaagatcgcgtcgttcagttccacagtgccgacttctgcgccggccatgttcaacactttcatagtagacattgatcaagcacccctttcttacttgtttctggcggaggccttctgcgggttgcggccggaggccttctgcgggttcttgctgatgtcagcgccggcctgcttgaccttgtggaccttgaccgtggacttgatggtcacgaggccgcccttggggccggggatcgcaccgcagaccaccagcatgttcagctcggggtcgaccttgacgacgctcaggttctggacagtcacctgctccacgcccatgtggccggcgccgatggtgcccttgatgatcttggacatgtggctggtggcgcccagagaaccgatctgacgggccacagggccggagccgtgggtctccttcaggcggtgggcaccgtggcgcttgatgacgccctgatagccgtggcccttgctgatgccggtgacatccacgaagtcgcccgcctggaaggcatcagccttcacgatgtcgcccacgttcagctcggcggcattctccaggtcgaactcccgcaggtacttcttgggagccacgccggccttgtccaggtggcccttctcgggcttggtgagcttgcgctcagagatgtcctcaaagcccagctggaccgcctcatagccttccttttcggaagtcttcttctgcacgaccacgcagggacccgcctcgatcacggtgacggggatcacatggccgttctcgtcaaaaatctgggacatgcccacttttttgccgatgatcgctttcatggttgttcctccttaaaggttattggtcggcttagatacgtgcgggttgggtcccgccgcattgctctgccgacatgacccgtctgcctcgcaagacggcagacatggacagcaaacaattttcaatctattttcgccgcggcgtgtacgtggcgaaaataccttgactcagccgccctgggcggcgccgccagtgcgcacactggcgagggggaatctaaagggggatttcatcccctctttaattggttacagcttgatctcgatctccacgccggcaggcagctccagggccatcagggcctccaccgtcttgggggtggacttggtgatgtcgatgaggcgcttgtgggtgcggcgctcaaactgctcgcggctgtccttgtacttgtggacggcccgcaggatggtgacgacttccttcttggtgggcagagggatggggccggacacggaagcgccggtgcgcttggcggtctccacgatcttctctgcgctctggtcgatgacctgatggtcataggccttcagccggatgcggatcatttctttctgagccatggttgtttcctcctgatttcgtaggtagtttcacgagtctcgacgacctacggcgagagaatttttctatacgcttaaccgtgcgtatcattccagctcatgaaaaataccggcgcatgatacggccggtatcctgtcatggcgcagcgatctacgcaacgtacagatccttctcagccgcccgattatcggacatactccccggaagttacctctttcgagcaatctcccggttcatcgcagtactcgccgggcgcagttctgccctccacgcgagctttattatcataaaagaaaatcttgctaatgtcaagcctattttctctgttttttatgaaaatatgaagatttttttggagggctggatctttttccaattcttccgaaattttggaggaaaaccgtcggtttcagcccttccggactgctgaaaaagagaggagggggcgttcccctcctcccttttcgttctcaataagccacaccccagtagatgtcggtggtgcatttcctgccgcacacggggcaggtgccctccgtgccgctctggaccaggggcatacagcgggagctgacaccggcccgctccttcatggccagctcacactccagactgccgcaccacttggaccggaggaagccgcccttcccctccacaatggccttggcctcctcgggagtttggatgtcgaaggtgttgtcctcccggttcttcagggccatggcatacagattgtcatggatgtgatccagcagggccttcacggcgctctccagctccgccagggccacggtgatcttctcgccggtgtcccgccgggcaatgacgcactgctccttctccatgtctttggggccgatctccacccggacgggcacacccttcatctcatactctgcgaacttccagccgggggagttatcagagtcgtccatcttgctccgcacgccggccgcgttcagccggtcccgcagagaggccgccgcctccagcaccccgggcttgtgggccgccacagggatcaccaccgcctgggtgggggcgatccgaggaggcagcaccaagccgttgtcgtcgccgtgggtcataatgatgccgccgatcatccgggtgctgacgccccagctggtctggtggggatagtggggctggttgtccttgccagtgaacgtgatgtcaaatgccttggcaaagccgtcgccgaagtagtggctggtgcccgcctggagggccttatggtcgtgcatcatacactccaccgtgtaggtctcctctgcgccgttgaacttctccttgtcggtcttgcggcccttgatgacaggcatagccagcacgttctccatgaagtccgcgtagatgttcagcatctgcatggtctcttcccgggcctcttcggcggtggcgtgcatggtgtggccctcctgccacaggaattcccgatggcgcaggaaggggcgggaggtcttttcccaccgcagcacgctgcaccactggttgtacagcttgggcaggtcccgccaggagtggatgatgttggcataatgttcgcagaagagcgtctccgaagtagggcggatagcgcagcggtcctccagcttctcactgccgcccacagtgacccacgcacattcgggtgcaaagccctccacatggtccttctccttctggagcagggactccgggatcagcaccggcaggtacacgttctcgtgccccgtggccttgaagcgccggtccagctccgcctggatattctcccacagggcgtagccgtagggccggtagatgaacatgcccttcacggaggtgtagtcgatcagctccgccttcttgcagacgtccgtgtaccactgggcgaagtctacgtcccgtgcggtgatggcgtccacctgtctcttatcctgtgccatagtcttcatccttttctctatgatcgcgccgtccttcggcgcagtttacactgaacatttattgtatccactctgggagaaaaagtcaactgttatggctccctggttccgcatttgcagaactgatattgcgccgaagcttgctctctttgatatttgagaggaaagcagggcgctttcctgcaggagattcgtccatataggcaggctatgtgctccggcggctcccatctgctgacggaagtacccttcttcgaaaccaagaacaggcggcgggccgatggcccgccgccttgctgcaattcttatttcgcgtactcgatgaccttggtctcccgcaggacgtggaccttgatctgaccggggtactccatttcctcctcgatcttcttggccaggtcccgggccaggatgaccatctggtcctcgctgacctgctcgggcctcaccatgacccgcacctcgcggccggcctggatggcgtaggccttatccacgccgggataggagccggtgatggtttccagctgctccagacgcttgatgtagttctccagattctcccgccgggcaccggggcgggctgcggagatagcgtctgccgcctgcaccagacaggccaccacggtccggggctccacatcgttgtggtgggcctcgatggcgtggatgatgtcctcccgctccttgtacttccgggcgaactccacacccagggacacgtgggtgccctccagctcgtggtccacggccttgcccagatcgtggagcaggccggcccgcttggcagcctggacatccgcacccagctcggaggccatcatgccggcgatgtggctgacctcgatggagtgctgcaggacgttctggccgtagctggtccggtagtggaggcggcccagcatcttcaccagctccgggtgcaggttccgcacgccgcactcgaacacggcgcgctcaccctctgccttgatggtgttctccacttcccggcgtgccttctccaccatctcctcaatgtgggtgggatggatgcggccgtcggcgatcagcttctccagggccaggcgggcgatctcccgccgcaccggctcgaagcaggagacggtgatggcctcgggcgtgtcgtcgatgatgagatccacacccgtcagggtctcgatggtgcggatgttgcggccctcgcggccgatgatgcggcccttcatctcgtcattgggcaggggaaccacactgacggtcatttcggccacctggtcggcagcgcaccgctggatggcctgggccaccacttcccgggcgcgcgcctcgcactcttccttcatccgggactcgacctctttgatcttgagggcggtctcgtgggtcacctcggcctccacctgagcgatcagataggccttggcctcctcggcggtgaagccggaaatccgctccagcatctccgtctggctgcgcttgatgactttgatctcctcgttttccttgtcgatggccgcatgcttctgggccagggactcctctctcttctccagagcctcggtcttgcggtcgaggttctcttccttctgctgcaggcggttttcctgccgctgcaggtcggctctgcgcgacttctcttccttctcgtactcgctgcggttcttcaaaatctcttctttggcttccagcagtgcctcttttttcttggtctcggcgctcttgatggcctcgttgatgatgcgctttccctcttcttccgcgcttgagatttccttttcagaaacggttttccggtagcgaataccgaggaagaagcagatcacgccgccaactgccagcccgatcagggcggcaacgacgtttccaatcacggtatcttctcctcctgtgtccggtatcctgtacgctttgggttttatatgcaggccgcatgggccgcatgggcagaaaacaatcggaaggcccctgttgcctgccgacaattatccgtttttagtttaatcgttctgccctcttctgtcaaggcaaatctgtatatttacccaaattccgccgaacgcttttggagttttttacgaggtctgtcaggtgtacccctgtctccggcccgccggcttcccgccgcggcgggaagccggcggattctcacgtattgatgtatgccgcggcggcataccccacctgatccccgtagtgcaccacataccagccgttccattcgccgtagatcgtaacagcggcgccgttgggaaggttggcgatcaccttgccggaggaggatggatagtcccgcaggttcagcgtgccgttgctcacagacacggtgccctgcatcgggtccatggggtagataaagggcaggccgaaatactccgtcaggccccgggcaatctgctgggcgatggcatcccagtggccctccagccaggtggcgtcgctgtaattgtcgtggtagccgatctccagcagtacagagggaaaccggggctggcggacctctcccagtgaagtggtggggcgggtagtgaccttgttgggcaatggatagatcttccgcagctcctgggcgatgagctctgcggcccgctgaccgcccacgctgccggggtaatagaaggcaataatgccccgttcctcgccatagcgcccctctggggcggcgttggagtggagcgccagatacaggtcatactccccctgattggcctcccggatggagctgccggcagtcatctccggccggttgcgctggtactggatgccgttggagagcagatagggcaccagggcgtctgccagcaggttcatgttgtactcctcggacccgctgccggtaacgtacatgttccagtcctgagtggacgggctcagatagatcttgggcatggaattgtccctccttttttcccagtctatggcgtttccctcaaaaatgtgatacactggcctggaaatatcagagggaaaggaatcatgccatgaaagcggaacggaattaccccagatacaccgtcacggccaaagcggaggccgccatcctccggggccacccctgggtctatgacgcagaaattacagccacagagggacaggcggaaaacggcggcctggtggacgtgatcagcaaaaagggccggtatctgggtacgggctttttgtcggaacagtccaagatccgggtgcggctggtgtcccgcaacgccaatgaccagttcgacgccgccttctggcgccggaagcttcagtgggcctgggaataccggaagcgcgtgatgtctccggaggacctggacgcctgccggatcatcttcggggaggcagatgcctttcccggactgacggtggacaagttccacgacctgctgtccgtccaggtgctgtccgtgggcatggagcggatccaggacatcctgctgccggcgctggcggagctcctccgggcggacgggttcccgatccgcgggatccttctccggaacgacgtggccctgcgggagaaggaggggctgccccagggcaaggggtggtatcccctgccgggggaagcggcgccggattctgcagtgacggagatcacggagaacggcgtgaaatatctggtagacgtggagaacggccagaagaccgggttcttcctggaccagaagtacaaccgccgggcggtggggcgcatcgcccggggcaggacggtgctggactgcttcacccacaccggatccttcgctctgaacgccgcgatgggcggggcgaagcacgtcaccgccgtggatgtgtcggagtccgccgtggagatggcccgggccaacgcggcgcgcaacggcctcaccggcgcagtggactgcgtggccgccaacgtgttcgacctgctgcccgcgctggagaaggagccgaagcggtacgacttcatcatcctggacccgccggccttcaccaagtcccgcaggaccgttgccaacgccatctccgggtataaggagatcaactaccgggccatgaagctgctgccccggggcggtcttctcgccacctgctcctgctcccacttcgccacggaggagaagttcgcagccatgctccacagcgccgcccgggacgccggagtgcagctgcggcagatcgaggcccggcagcaggcctgcgaccaccccatcctctggggcgtcgaggagacgaattatctgaagttctacctgttccaggtggtatgacgccgccgtttcccaacgtgccgccctgcgcaaacgggccgccccacaaggggcggcccgttttttatgggacatataccgttttcagaggaggatctgtcccggatttcagccggttctctcagcccacttccaggaagcggaccacgccctggtacacatacagcgtggcgctgtctgcataggctctggcctcagtgagggtgacccagctcttggtctgcgtgttgtagcaggggacgctggcagggaccgtgtaggtccggccgttcaccgtgacggcgcccttgccgctccaagcggtgttgggcacgttccgcagctcgtcaggatagaccaggctgccgatccgctgggtgtttccagaggtgacgatggtgatgcccacgatgtcgccgttgcgcaccacatagccggtctcaaaggtgggcgtgctcttgcccgcaccgtattccacagacagctgggcattgccctcccggttgccctcttcgtcatagttcgcggtatagttggcgcggccgaagatgtagccgccgccgatggcggaattcagcacgatgaccttcaccctgcctgcccagtcggtgccggcgtaggtgatctgggaagcgggcacgctgccgtccgcgatctgggacaggctgatggcggtgaggccgctgccgtcgttctggaagacaaccacattgtccgccagattccggctgcccagcttgcgctccgccacattcagctcgccggagacgccgcccgtcaggcgtgtcagggacaggccgcccttccggctggaggagacccgcaccagctggccgttcagccgctccacatcgctggcggagagactgaccgagcccttcacctggatgccgcagagcaggtccaccgtggcgcttccgctggagacctcggcgatgccgatggcattgccggtggccgtgttgccgctggccgccaccgcgccggccacctgattgtcctcggtcaggagcagagtgatctggtcgccgggcttgaactgggagaccgtctgcatagcggtgggcagcacgttgaactcatagcccaggaccgtgatcttcgtgggctccttgggattgggataacattcctcatagtagccggtaatccgggtgtcgcacacgcggatggagttggtggtgctggaataggttgccacgtcgtacttgcgcatatccccggccgtggcgggcaggccgttcttgtagatggcgtatccgctggtgccgccggccagagagctgaagcccgaggtggaccccttctcatagatgatgaccgcctcgttggacgtggtcccgccgccgccgacgaacacatagtccacaccgccgcctgcatccagatacagcgtcagggaggtgcccgcgttcagccaggagtagacctcgctccacacggactccttgccgttgtagtagacgccggtgtcgttgtccataacgtacttggtaccggtggtatccgtcagctccgtggccttggccgtggagaggaccacgaccttgctgctgcccacggaatccggcacaaaggtcagggcttcattaccgttcttgctgagcagcagtgtccccttggtgccgttgagcatgccgttggagaccttgccgtccgccagggagtaaactgcgccggaggccatctgcagcgccgttccggcgccccgcggtccgtcagccgtggaggagaccagcatctgccccgtccgggtctcgcccagtgtggcgagatagctgccgccctctttctggtccgcccgaagcagattcaaaaagagcttggccgcctgtccgcgggtcaggccctcgtttccagttccgctgacgccgtcggtcaggccgatgagcgcggcttccgccatatagctgtccggccagacgccgccgacgtcttcgtccttgtagcccagcatccgcagcaggatggtcaccgcctggcccacggtcaccgtgcggtcggggtggaatttcccgtctgcgtagccggagatgatgtttttgcccttggcggccatgttgatatacggcgccgcccaataagagggcttcacatccgaaaataccgtgacggtccggtagcgtcccagctcattgctgccgttcatggcgtagaccgccatcttgcagaactgcgcccgggtgaggacagtgccggggcggaaggtcccatccccatagccgtccagcacaccgagcagacgcagggattccaccgccactgccgtgctcttgtccccgacatcggaaaatgtgactgctgcggtattggccgcccccgccggcaccgccagcagggaaaccgccatgcacacggccagcagaaatgtcatgattcgtctcttcatcagtctctccctctcattctgcccgcagtgcttccacgggctggagcctggcggcctttgccgccggataaatgccgaacaaaattcccagcgccaccgacagcgtaaaggcgcacagggtaatccacgccgccgggtagatggtcatctggaacatcagccgtcccaccagcaggctgccgccggtgccgatgaggatgccgatgatgccgccgattccgcagagcatggccgcctcgatgaggaactggatgacgatgctgctccgctcggcaccaatggcccggcggatgccgatctcccgggtccgttcggtgacggtcaccagcatgatgttcatgatgccgatgccgcccaccagcaggctgatggcggcgataccgcccagaatcagggagatcatgcccatctgcttgttctgctcctgttgccaggagttctcctggtccacctggaagccgcctgcgttgggattaaccactcccttcaaaaagccgccgatgcgggagctggcctcgatcatgtcctcgctgctgcgggtcttcacgatgaactgctccggtgcgtcgccgcccagcacccggcgggcggtgtagggcagaatgatgacattgtcgatctggctggcggatgcgctttcaccggtaaggcggggggcatagacccccaccacctcaaagctctgcccgttgagctggagcaccttgcccacggggtccgcggcgtcgaagaagatctttgccgcccggtcccccagcacacatacctgcttgtagccccggatgtccaacacggacaggtcccggccggaggccagcgtcaggttgttgcagatgctgtactggtcgctgccgtagtaaatgctgggcggcacgtcgccggtgagattgccgttttcatcgtaattatagctcatattggcggtgctcttggtcccgtataccaccgtggcgttgcagtacgcctggggcgtcacgcccagcacatactccttgatgctgttgcagtagtcgtacagcgccggaaagtaatcctgacccaggctgttgccatcttcgtcatacaggtagttccagatgttgacggtgagcttgttgctgcccatggcctcgtactgctccatggtcttttccgtatagccgttgatggcggacacgatggtcatcaccgccgcgatgccgatgatgatgcccagcatggtcagggcggaccggccctttttgccccagatggacttccacgccatcttcacggcctgttggatattcaaagccagtccacctcctgctcccggtcctcaatgattctgccgtccgccaggcggatgacccgccgggccgtggcggcgatgccgttatcatgggtgatgagaatgacggtgctgccctccttgttcagctcctggaggaatttcagcacctcctgcccggtgtgggagtccagtgcgccggtgggctcgtcggccatgatgatgggaggcttggtggcgatggcccgcgcaatggccacccgctgctgctggccaccggacatctccaccggccggtgcttgatgcggttcgccagccccacccgggccagggcctccagggccatgtcccggcggtcatcggcattcaccccctggtagatcaggggcagttccacattttccagcaccgtcaggctctggatcaggttgtactgctgaaagataaagccgatctgcttgttgcggatgtgggacagctccttgtccgtcagctcccggacgtccgttccacccaggagatacgtcccccgggtggggatgtctaggcagcccagcacgttcatcatggtggacttgccggagccggactggcccaccaccgccacgaactcgccctttccgatggtcagggagacgccgtccagggcccgtacctcgctctcccgcccttcgccatagatcttatagacgtcccgcagctctactaagttcttcgccatgggcatcaaccccacgcctgcagggactggatctgtgtgaagacctcggtcccctcttccacaccggacttgatctccacattggagttgtcggagatgccgatctccaccggcaccgcccagaagccctccgggatctcctcgctcagggtgggcgtctcaatggcgttgtccggccgactgccctttacaaacaccacgttcacggtggagccgtcctcctgggtcacagtacgcacgcactggagcggcaggaccaggcagttgtcattctcactggcagttagagtgtagtcgatatagctgttgacctgcagggtgccctcgctgttgtccgccgagatggtgataggataggtcgccacgccgttgttcaccgtgctggagaggctgaccgtctccacggtgccgaaggccggggtcccccactggctcagctccaccggcatccccggcttgatgtagctgatgttccgctcgtccacattggcggtaatcaccacgctggaggtgtccgagatggtcaccactgcggtatttgcagcgatctcatcgccgggctggatggtcaggccgattaccatgccgtcaatgggagccttggcgttgcagttggccaggttctcctccgcagtcttcagctcctcccgggcagtgtccaggttctgctggatggtgaagagctggctctcgctctcctccccgtcgatgcgcaccagcacctggccgggcgccacctgcaggtagtccaccagattgctggaaatcaccgtgccatccaccgtggaaaccaggtcgccggtgcggtagtacgccagcttgccggcctcataggggtacacggtctcaccgttcacagtggcggtggcagaggccaccatatccgccgtcagggctccctcattctccacgataatgtcggcggagaagagcttggacccctccggcgtgatgcggctgaccatgtggaccgcctccaccgtgccgggaacggaggtcatcagggcagggatcgaaacattcaccgtctgtcccacctgcaggtcgcccgcataggcgtagctgtaatactgctccagccgcagacgggtatcgtcggagaggaccgccaccttctggcccttggtgatggaatcaccgggattcagcgtcacggtctccatcagcttgccggcatagccggcggagagattcagtcctgcgatgtctttctgggcctgggagagctgtttctcatagccctccacattgctccgggccttctgcacggcggtctctgccgccggagagtcgatggtgaacagcggcgtgccggcagtcaccgtctcaccctccgccaccagcacatccaccactgtgccgacagtggtgatggtgattgtctcactgctcttggccttggtcaggccgctgccctggaccgtggaggtgatggaaccgtactgcacaatgtcggtgaccacctctccctcatcgctgctcttgccgcccagcactttcagcagcaccaccgcggcgatcaccagcagcagtgccagtatgcacaggcggatgatccggcgccgcttcttccgcgggatcgcctgccaccgggccttcaggtttacgcgcgtctccgcgggggcggcgctgtccgccgccgtctcctccatcgccggagcggtcgcttcctgttctacattctccaggtctttgacttcagccatggtatgtactcctcttcttgttcttcacagatgcatcaactgtattgcttataatagtacagtatgtagggcaaagcaataacaaaacagttacagtttctcccgcggcctgtatctcttgtaacctgcgggtatgtgtgaaaaagtgctccccggaagccggggagcactttcaaggtcattcagaccatggcggcgcgccgggcgctgaagcgctgatagaggacgatgccaaccaccaacacaaagccggcgatgtcggtggccgtgccggggatcatcatacccaggccgcccacagccatggccacccgcagcagcgcggggatgggccggtacaggaatccgttgagggccgccgccacgccgaagatgcccagcagggcgctgatgcagatctgcaccacctggaaggcaccggtcacatccacaaagagcatctgggggctgaaagcgaagatgtacggcacgataaaggccgctatggccagtttcgtggcgttgaaccctgtcttcatgggatccgccttggcaatggcgctgccggcataggccgccagggccaccggcggcgtgatgtccgccacaatgccgaagtagaacacgaagaagtgggccgccatcttggtgacaccgatggagggatccatcaggatgggagcgcaggtggccgccatgatgcagtagttggcggtggtcggcacgcccatgcccagcacgatgcagcagagcatggtcagcgccagggcgataatcatgtggccgccggagaggctgacgattgtgctcaacagcttggaggccaggcccgtcaccgtgatgcagccggagataatgccggccacgccgcaggccaccgccacagtgatggagcccttggcgccgccctccagggcgtcgatgatcttgccgaaggtgaggaagtcctcccggttgctgctcttgctggcgatctccaccacgttgttgaccaggcctacggccacggccgccacgattgcgatggcagcggagaaggccatggtgtacatattggtggagaccatgaccaccaacagcaccaggggcgccagaaggtagatcttgggcagcagctggcgcacgcggggcagctgctctctgggaatgcccttcaggcccagcttcttggcctccagatggacggcgatgtagatgccggtgaagtacagcaccgccggcaggatggcccgcatggcgatggtgccgtagggctcgccggtgaactctgccatcaggaaggctgcggcgcccatgatggggggcatgatctggccgccggtggaggcagccgcctccacggcgccggcgaactccggcttgtagcccgtcttcttcatcatggggatggtgacggagccggtggtgacggtgttgcccacggaggagccggacaccatgccgcacagggcggaggagatgacggccaccttggcggggccgccgggggcggcaccggccacggcattggccaggttgatgaagaactgggcgatgccggtcctctccaggaaggcgccgaagatgatgaacaccacgatgaacttggcgcacacgctgatggggccgccgaagatgccgttgaaggtgtagaacatggtgcggatgacctgatagagggtcatcttgaaatctgcactgccgcccaggttgaagaaggtgtacaccagcagcacaccggccacgcacaggatcggcaggcccacgcaccggcggcacagctccaccagggccaggataccgatgaggccgataatcatgtacaggtcgttctgcatgacccgggcggacatctggaccacgttctgggcattgacggcgtagaaaaagtaggcgccgggcccggcaatcagcagcacgatgtcataccagggcatgtggttgacccgctcgtccccttttttggccgggaaggtcaggaagccgaacagcaggatcagccccacgaacatgggcagccgaacctcctgccgggtggaaaggaacacagtgtcgatgatgcagtaggcggagaacgctaccatcagccagcggatcaccagcttcggcagaccctcccagacccgggtgttggactcccggtcgtattttttcatgaccgcctccacatcggcggcggtccccacggaggtatcgtgggcgccggtatcctccggcggcacaggctccgtcttgtgtttcttgaacagtgccatagggtcccctctcatttcgcaagatatcttccaggccgggaccgacccgaagtcaaggaactacggcggagattccgccgtagttcccgatcaggctccgcctgagatcacttggtgggtacgtcaaagcccttttcggcgaagtacttggccgcgccggcgtgataaggcaccgcggtgacgccggaggcaaattccacatccagctcccctgccttgtcatgggccagattgtccatgttctcaaagatggtgtagcagatgttgtacacatcatcctcagacacatcgtcccgggcgatgacggtggctaccacggctacggtcttggtctccggcacgccctcataggtgccctcggggatgatgtactcctcgtagtagggagaggactcctggagcttggcaatgtgctcgtcatccaggcccaccagataggtgtccttggcggtggccagagtggtgatagccacggtgggggcgcctgccaccacgaaggcggcgtcgatcttgccgtcctgcagggcgtcggcgctggcgccgaagtcctggtactgggcgttgatgtcatcctctgtcaggtcataggcggccaggatatccagggcgttgtagtacacgccggagccagaggcgccgatggagaccgtcttgccctccagatccgccacggacttgatgtccgggtcacaggtgacgatctgcacctgctccatatacagagcagcgacagtggagaaatccgcataggggaacccctcaaacagccgctcgccgttataggcgtagctcatcacgtcggactggacgaagcccagttgggccacgttcatctgcatctgctcgatgttgtcctgggagccgttgctgaccacggccgtgaccttggttccgttgccgttggtggtgatggcctgcgccagcacgctgccgaagccgtaataagtaccctggtcgccgccggtgcggaatttcagctccgtgccggtgccggtgacggaagagacgctccagttggtctgggcagcctgctcagtgccggtgtcggcgggggtatccgtctcctccgtggagggattgccgccgcagcccgtcaggaccgccgccagcatcagcgcggcaagaagcagggataagcactttttcatgtttccattcctcttttcctgttagtcgatacagctcgtatgtcgctttgcatatcataccttatcctcattcattttacaaggttttttttacaattttttaatatttctgcaagtccaatttgcacaaccttcattttcccgtcccacctctctgaaatgccgaaaggccggccccaccggggccggccttctgccgcgtatgcttatttgatgaccaagatgagctggccgcccttgacggtctcgccctccttcaccaggatctccgacaccgtgccggacatccgggcggtgatggcggtctccatcttcatagcctcgatggtgaccagggtctggttcttctccacggtgtcgcccaccttgacgttgagcctgctcaccgcgccggggatagaggagcccacctggctcttgtcctccgggtccgccatggggaccttgacaatgttcttctgggcctcctcgtcgggcacctgcacatcccggcggatgccgttgagctcaaagctgacggtgcgcatgccctctttgtccacttcgcccaaccctaagtacttgatgaccagggtcttgccgtcggcgatgttgaccttgttggtctcgcccaccgccagaccgtggaagaacacatggctgcccagccgcatgatgtagccgtactccttctggttcttgacataatcctccactaccttgggatacaggcagtagctgaggatggcccgccaggagggatctgcatcaaaggactgcatctcccgcttcttctcctcaaagtccacggggggcagcagctcaccgggacggcaggtgatgggcttcttgcccttcaggaccacccgctgcagctccttggggaacccgcctgcaggctggcccatcataccggagaagtagctgacaacactgtccgggaaggccaggctctcgcccttctccacgatgttctccggggtcaggttgttctgggtcatgaagatggccaggtcacccaccatcttgctggagggcgtcaccttcacaatgtcgcccaccatctcattgaccttacggtagttctccttgacctccacaaaccggtcgcccaggcccagagactccacctggggcttcaggttggtgtactgaccgccggggatctcgtagcggtaaatatccgtggtattgtactccaggccgccctcaaaggagtcgtaacgcttacgcacatcctcccagtaatcagtgagggtctggagccggtccagatccagcccggtgtcccgctctgtgtccttcatggccgccaccacggcgttcagagagggctggctggtcatgcctgccatggagctgatggcacagtccaccgcgtccacaccggcctcggcggccagcagcagcgccgccacctgattgccggtggtgtcatgggtgtggagctggatgggaatgccgatctcctgcttcagggtggacaccagcttcttggcggcgtaaggcttcagcaggccggacatatccttgatggcaagcatgtgggcaccccggtgctccagctctttcgccatcttcacatagtagtccaaggtgtacttgtcccgcttgggatccagaatgtcgccggtgtagcagatggtggcctggcagatcttgtcctgcttgaggacctcatccatggccacctccatgccggggatccagttcagagagtcgaagatccggaacacatcgatgccgctgcgggcggcctccttgatgaactcccggatcacgttatcgggatagttggtatagcccacggcgttggcgccccgcagcagcatctgcagcagcaggttgggggccttctcccggatcaggtccagccgctcccagggggactcgtggaggaaacggtaggccacgtcaaaggtggcgccgccccagcactccagagagaaagcatccgccaggatctcgctggtgccctccatacccttgacgatgtcccgggtgcggacccgggtggccagcagggactggtgggcgtcccggcaggtggtgtcacagatcagcagcttcttctgccccagcacccagtccgccacggccttgggtcccttggcgtccagcatctgcttcaggccatcgggccggttgccggtgaccggcgggaaccggcagggatcgtacatcttgtgtccgtcccgctccttcaccacgatgttcccgatgtacttgagcatcttggtggcccggtcctggccctcgttcagctcaaacagctccggcgtctcgtcgatgaacttggtgtggcagcctcccgccaggaaggtggggttctgcaggatgttggagatgaaggcgatattggtcttgacgccccggatgtggatctcccggatggcccgtccggccttcaggcacacgccctgaaaggtgttatcccaggtggtgaccttcagcagcagggagtcatagtagggggagatctcgctgcccacgccggcggtggccgcgtccagccggacgccgaagccaccgggagaccggtaggaggtgatcttgccggtgtcgggagcgaagttgttggacgggtcctcggtggtgacgcggcactggatggcgtagccgttcaggtgcaggtcactctgcttcctgatgccgatgcggggatcgctgagaggacagccctcggcgatcagaatctgagagcgcaccaagtccacgcccgtcaccatctcggtgacggtgtgctccacctggatacgggggttcatctcgatgaagtagtggtgcccttccctgtccaccaggaactccagggtgccggcgttcacatagcccacgtgctttgcgatcttcaccgcgtcttcatacagggcctgacggatcttcttgtccacggagaaggcggggctgaactccaccaccttctgatagcgccgctggagagagcaatcccgctcgaacaggtggaccacgttgccctcttcgtcgcccagcacctgcacctcgatgtgcttgggctccaccaggaacttctccatgaagatgtcgtcattgccgaaggccttcttggcctccgccttcaccagatcgaagttggtgcccacctcttccacggtgtcacaccggcgcataccgcggccgccgccgccggcggccgccttgagaatgacggggaagccgaactccatagccagcttctgagcagcctcccggctcttcaggggctctgtggtgccgggggtggtgggtacgccgcaggccacggcgatctgcttggcggacagcttgtcgcccatcaggtccagaacctgggaggagggtccgatgaacttgatgcccgcagcctcgcaggcccgggcaaaatccgcgttctcactgaggaaaccgtaaccggggtgaatggcatcggcgccgtgcttcttagccagctcgatgatccgggggatgtccagataggcacccagggggctctcgttctctccgatcagataggactcgtccgcggcggtgcggaagaggctgtatacgtcctcattggagtagatggcaatggtctggaggcccaggtcgtgacaggcccggaagatccgcatggcgatctcgccccggttggcgaccaggaccttcttgaatgcttggctcatatatcgttcctccttctctccgccggcaggcgggaatcttttggttcagcttagtatacaccaaccccgccgccggttgcaacggcttccagcccggatttgtcaattttatcccgccgtcatattttgagcctggctgatggggcgctttgtctatttcagcaggtcttatgtctgctatcagcggcactgcggcccgccgggggcacaaaaaagacggcgccctcagggcgccgtctccggctcatctcaggcggtcctgccagcggctgcgaagctgaaccacccccgggcgtcccgctggacaccggagaagccgtcccgcagtgtccagcccgtcacgctggtgtagaggggcgccgcggccccctcctctagcagcagggcctccgcatcgtggaggcaacccatccgggcctccccctcctccgcgccggcgatgaccgacagcagggtatcataggcgctgttggcgtatttacccaggttctccggcttatcggagccccactgcatcaaaaagcactccgcatcgttgcccaaagcccggatctccgttcctgccagggtgaaggtcccctcctgcagggcggtgtccagctcttcccggctgacgccgcgggccgtcacctggaggcccagggcgctctgccaggcgtctaccagcgcctgggccacggcggcgccgttcccctcgtccacgtagagatattccagctcccccaggtcccgggcgtcggcgtatccggcctccgccagcaggccgcgggcctcctccgccagctcgtcccggtgcgcggggtcgttgtccagcagcacgccgccatctgtacggaaatcctgctccccgctccccggcacgccgggagggatcaggccctcagcggcatacgccgtggcgcccgccgcctcagcagcggcagaacggtccgccgtcagagtcagcgcccgacggacccgggcatccatcagcgtatcctgcgcgcagttgaacaccaccgcctgaacgctcagctcccgcgccagggtccggctctccgcctcgatcaaggccgtcagctgctccgccgggaggatgcccaggaaatccacctccccggcgtcgtagaggtcctgtcccgcctctgcggtctccgcaaatcggaacgtcagggtctgcggcccggagaaactgttgcggtaggtctcgctggcctccagggtcagcgcctcaccagcctcatacccgctcacctgatacggcccgttggtcacaaggcccgtaaggtcgttccaccaaggggccgcctccgccggctccgccgctgcttcggcggtctccccgtcagcggcagcggtctcctcctgcagcaagtcctgccgcagaggcatggtggcgggcgcagtgcagacctccgtcaaaaaccagtcgaactttccgttcagcaccaccaccagggtgctgtcatcctccgccgtcacctgcagcagcgacacgtcgccggtctcccgcacggcgtcgtagcctgctaccacggacagcagcgacgcgctgggggaatcgttggccggatcggccagccgctgccaggcaaagacaaagtccccggcccggaccgcccggccgtcggaccactcggccttccgcagcttgaaggtccaggtcacggtgccgtcggcattctcctccgtactgacgctcttggctgcgccgttcgtcaccgtggtcccgccggagccgtctcctgttttccgcatcagattttcatacaggtggaccaggacggtctggtccgccgtctctgtggcgtagatgggatccagctcctccggcgcgccgcccacgcagacggagagggccggcccctccccgcttccgccgcagccggtcaggctgagagccagcagcgccgccgccaagaacagcgcccaccggcgcttccaattcttcatatcgtcgttcctcccgctctggagtctaaaacgggcacccctgccgggcacccctgcatatcaaaggacctggtctattataaagattatcaggcagcttgtaaagttacgagccctcaaaaagtaacaaataattacaaaattaaaaatttattcacaaatcacagcaagaactcgaaaatgccctgtctcccagccggaaccagtggcgtgaaaagcgccgggcgcggatttccgcgtccggcgttcaaagccgttttcacgctgtggtcaggcggccgtcctcgtcgaacttcaccggaacgatctcgttccgggtcttctgggcgatgtcgtcgatccgcatcttggcaggatagtcggagatgaaagtcactgccacgccctgccgcctggcccggccggtccggccgatccggtggacgtagtcctggttttcgtccggcacatcgcagttgaacacgatgtccacatcatccacgtcgatgccacgggccgccacgtcggtggagacgaacacccgcagctcgccccggcggaacttctccatcacctgctcccgcttccgctggggaatatcgccgtggatgcactccgcgtcgatgccccgcatctgcaggaacttggtgatccgctctgtggagcccttggtgttgcagaaggccatgcaccggtcgaaacccgtctcgttcagaatcttttcaatggcgtctgccttaccgtcgtggggcacgtccatgcggaactgcttgatgtccggcttgttctgctcatcctcccggacggtaatctccgccgcgtcccgctggtacacccaggcgatgtccatgacctcccgggagatagtggcggagaagagtcccaggttcttccgcttgttcatcttgtccagcaggcgggtcacgtcatggatgaagcccatgtccagcatccggtccgcctcgtccagcaccacggtctgcgccgtgtccacccggacggtgcggcgcttcatgtggtcggaaagccgtcccggcgtggccaccacgatctgggggtgcttcttcagcgtgtcgatctgccggccgataggggcgccgccatagaggcacaccgtccgcacgccgggcttgaaggctgccaggtcccgaatctcgtcggtgatctggatggccagctcccgggtgggggccaggattaccgcctggacgctctcgtcctccgggtccacatgctccacgatggggatgccgtaggcaaaggtcttgccggtgccggtgggggccttggcgatcacatcctgccagtccatcataggcgggatgcagcctgcctggaccggggtggacacctcaatgttgcgtttttcaatggcgcgtatgatctccggcgacaggtgcaggctgtcgaaccggacgccttccgtaaattccatggctctcttcctctttcgtttatccgttggcctggccggcgcggctgcgcccgtagatcatgggcactaccaggactaccagtgccagcagggctgagaagaacgtggtctcgctggtcaccatagcgccggcggccaccaccaggcccgccagcatccaaagccagccggcaaaccggtggacctctttccacaacggcggattgtttaccgtaaaggagaaccgcagggccagcttggcatcctccgtgcagtcgaacatgtgggagcccagcagcatcagcaccagacccagaatgcagggcgtgtagaagttcagacttagcccctggccggaagtctccaaaatggcgccgctgcagaacagcagggaaatggttggaaagccccagcgccccatgagccggttaaacgccggtgggatcttcatccgcttttgatactgcagcagcatgaactgcgcgacagcctccagcaggcacatcaaaccgggcaggaggagcgccaccgcccaccggggcagggagtcatcctggccgccggggccgatcaggccggtctccacaatctccgggatccggtcccacatccgcacgcccaggatcattggcagggcgcaggccgtcagcgtcacgatcagcagcgcccgctgcttttccggcgacaggtgctttccaaatatctcagccccccggatttccaggtcgcggggcagggcctctctcttttttcggttgctcatagtcagccgggtcctccttctggggtccgcaggcagatcgctctgccgtcaaaatttttcttttctccgggcttcctatggactgcgccgggggaaacgggtattattatatatggaaaatacgcttttgtaaagcactgtcaaggaaaacgcccgtccatgcggagcagccccgcccggccgctccttgctctcccggagaaaagcagtcccggaatatgttcgcatttccccgcattcctccgttttttgagtaaatttgtcttataattgtagtaaaattttgtattgtgccccgtaagattcacaaattttatggtacattgtaagaaccagaaagctccagagcggatacggaggtgccacgtgaacggcggaatggattatgtacgcattttgcgggacctgcgggaagatgctgacaagacccagacccagatcgctgaggtgctcggaacatcccagacgatgtacgcccgctatgagcgcggggccaacgagcttccgatccatcatctgatcacgttgagcaaatactacggggtcagtacggactacctgctgggtctcagcaaggaacgctgaaacgcggacagggagagctccctgtccgcgtttttcaggtttcttcaatctgccggggcaatctcctgtgcttttgcctcgaccacgctgctctcgtcggcatcgggcaggtccgcggtaaagtgatctgctgcctgcccggtcatggtgccggaaaactctgtaagcccgttgtcgccgctgacagtctcatagctggtgccgtccccgttgtcctgggacacagtccaccggtccaggtcgccagtgacgtcaatggtgacagtccgggtctcccggctgccgtcctcatgcaccacatccatatcgtaggcgtagtgataggcacccgcggtctccatggcctcggtgatgtcaatctcctcaccctgagcgtggaggatcagccggccgttctccttggtgaccggctccccggccgctacggtgacatacacctcgttgccctggttatcctgggctaggtactgatttccggatgtccagacgatggtgaactgccggaagaactccccgtccgtggccacgttcactgccccggcggtgacggccagcgccatcaccatggcagcggcaatggccgcgccccgcaggacccggggcatccgctttctgtgcttcatctcctgcattttctgaaaaacctcctgtttggcttggtcggaggcacggagatgggaaaaggtctcctggtacagtctcttgtcgatcatgactctgcctcctgtaagatcagtttcagcttccccctggcccgcatgagccaggtctgcacggtggacggattggcccccatggccgccgcgatctcctgtacggagcagtcttcgtagtagtagagatacaccgcggcccggtatttgggcggcaggcccatcacgtgctggtagagctcactctgctgcggcgtgtcgaacaccggctccccggcctcctccagaggcccggtccgcctgcgccacggagagcggagcagcttcttgctctcgttcaccgccacccggacgacccagtaccgctcatgctccggcgaccggaagggctttcgctccagatagagcttcagcagcgtctcctgcatcacgtcctccgcgtcggcgcggtttttcaaatagctgtatgccagccggaacacggtgtcgccatagcgctccaccgccccctcgaatgccgcgtctgtcaatctcatcacaccttgctgttgggatgggcggcagcgccgcccggaaaggcctttctatcgggaatatccctcactggggtgaaatatctcacccagtccgaaagtttttcaaaaatcatgcgccccgcgcaggagcgggatctcgaaaaccggaaacggctgagccgtttccggttttctgcgtttttctcagatcggatcacttgtggggcacgtgccagatgttgtcggcatactccgccacagcccggtcggcggcgaacacgccgctgcgggcgatgttgtgcaggctcatgcgattccaggccgtctggtcccgataggtctccgccatgcgcttttccgcctggcagtatgcctggaagtccgccagcaaaaagtactcgtccgcggggctgcccccggcgccgaacagcagccgctggtacaggtcgtcgtaccggacaccgtcccggaagccggtccgcagcgcgtccaggcaccggtgaagcaccgggtcccggttgtacagccgctggggcacatagccttcccgcttcagctgctccacctcgtcggcccgcaggccaaagaggaacatgttctcgtcccccagcaggtcgtgcatctccacgttggcaccgtccagggtgccaacggtcagggcgccgttcatcatgaacttcatgttgccggtgccgctggcctccttgccggcggtggagatctgctggctcacctcgctggcgggcatcagctgctccgccagggagacccggtagttctccagaaacaccacctgcagcttatcgcggcagatagggtcgtggtcgatctgatccgccagggagttgatgaggcggatgatccgcttggccactgcataccccggcgccgccttggcgccgaacaggaacgtgtggggctgcgtgatggcgttggggtcgtcctggagcttctggtacaatgcgatgatgtgcagcacgttcaaaagctgccgcttatactcgtggagccgcttcacctgaacgtcgaagatggcgtccgggttcagctccacgccccgggtcttcttggcatgggcggcgaaggccgccttgttggcccgcttgatggcacccagcctctccagaacagaggcgtcatcggcatagtcatccagctttttcagggcctgggggtgcagcagatagtcgtccccgccggtcaggtcccggatcaagccgtccagtccggggttgatctcactgagccagcggcggtggtcaatgccgttggtgacgttccggaatttccagggctccatgccgtaggcgtccctgaaaacgtcctttttcaggatctcggagtgtaggccgctgacgccgttgaccgccatgccgccggcgatgcagaggttggccatgcggacctgaccgccccagacgatggccattttctccgtcttcttggggtcgtggtagaagtcctccaccttcttctgccagcggcgggagatctccaggataatctgccacacccggggcagcaggaattccaccaggctctggggccagcgttccagcgcctccgaaaggaccgtgtggttggtgtaggccacggatctcgtggtgatgtcccacgcctcatcccagtccatgccggcgtcgtcgatcaggatccgcatcagctccgggatcaccagggccgggtgggtgtcgttgatctggatgacgttcttctcatggaagttcttcatggtgccgtacagttcggtgtgcttggcggcgatggactggagggtggcggacacgaagaagtactgctgtttcagccgcagagacttgccctccagatgattgtcctccggatagaggaccttggcaatggtctctgccatggcctcgtcctccgcggccttcaggtactcgccccgggagaacagggacatatccaccggctgggtggaccgggcgtcccacagccgcaggacattcacatgctccgtgccgtagccggcgatctccatgtcgcagggcacggcctggaccaccgtggcgtcctcattgacgatgtgcaggtggccgttgtcccagaactcccgcacggtgccgccgaagcggacctcctgggtctccgcgggctttggcatcagccaggccgcgcccaggtccttccagttgtccggcagctctacctgctggccctccacgatcttctgcttgaagatgcccagctcgtagcagatggaatagccggtggccgggatctccagcgtagtcatggagtctagatagcaggcggccaggcggcccaggccgccgttgcccagggcggcgtccggctcgatctcaaagatgtcggccgccttgaagcccaggtgctccagcgcctcccgcagctggggcagcagccctaggttataggcattcttcatcaggctgcggcccatcagaaactccagagacaggtagtgcacctgccgggcatgctgctggcgggccttctgacgggtctccacctcccgcagagccatcatgtcccgcaggaccagggcgctggcccgcatcatctctccatccgttgcctccgccgccgtctttccgaagctgaccatcagcttggcggtgagggcgttctccagggtctgtgtggtaattggtgtcatgcgtctccttactccgccggctcctgtttcccggcggtccccttcttgggtttggtctctttcttggcaggcgtcctcctgccgcttttggcggccgtctttttggcggccggtttcttggctgccgtccgctttctggcggcaggcttcttctccggtgcggccggagcggcctcctcagccgccggctcggcggacgattgtgccgcttccgcggtcggctgcggagcaggttcgtcagatgcgggctccgccgcttccgcgggggcggtctcttccgcgggggcggtctcttccgcgggagcggattcctccgccggggcggactcttctgtccggacgggctcctccgcagggggccaaggctggccggtgacggtgctgtaaatgtgcaggtactcccccgcgctccgggcccagctgaaatcgcaggccatagcccgcgcccgcagccgggcgaaggcgtcgggatagtccttgtaaagatacaccgcctcccggatcacatacagcatatcactgccggcgtaatttgcaaaggtaaatccgttgccggcgtccctccaggactcgtacgggctgacggtgtccttcagtccgccggtctcccggacgatgggcacggtgccgtaccgcatggcgatcatctgactcaagccgcagggctcgctcttggagggcatcaggaacagatccgcgcctgcatagatggccatggacagctcctcgttgtagtccaggcgcacggccatgcggccggaatactgctgggctgcccactggaagaactcctcgtacttccggtcccccttgcccaggatcaccatctgcaggggcagctccatcatgtcgtggagcacctcgcacaccagatccaggcccttgtgggacaccaggcggctgacgatgcccacgatgggaacgtagggctcctgccgcaggcccatgagcttctgcagctccgccttgtccgcctgcttgcccgccatgtccgccgcgctgtaattgacggcgatgtggggatccgcggcggggtcataccgcttcacgtcgatgccgttcagcacgccggagagcttgtagccgcaacggcgcatgatgccgtccagccggtgggcgaagtagggcatcttcagctcgttggcgtaagtaggagagacggcgttgacggcgtcggcgcacaaaatggcgcccttcagcaggttcacgtccccgtccatcagaatggtgccgtcatccgcccagccgtggtccaggccgaacaggtcccccagggtctggcggccgtagcggccctggtactcaatattatgaatggagagcacggtccggatactccggaaccgctcctcccgcacgctgtcgtccttcagatagatgggcaccagggcggtctgccagtcgttgcagtggatgacctccggccagaacctcaggtggggcagcatccgcaccacggcccgggagaaaaatccgaaccgctcgccgtcgtccatgtagccgtacaactccggacgccggaaatactgctcgttgtccaggaagtaccaggtgacgccgtcccgttccatggagaacagcccgcagtagctgtggcgccaggccaggtccacatagtcgtagcattcaaaatgcagctggtcgctgaatttctccttcaccttctggtacaggggcagcaccaccgccacatccgcgccctgggccgccagcgccgcaggcagggagcccgccacatccgcaaggcctccggttttgcagaacggaaccgcctcgctggccgcatataaaatcttcatagtcctctcctttcacgctcatgcgccccgccctccggcagggtcagggaccggcgggactccgtcagccggagccccgcccgtctattcgccgtcctggaagccttcctcccgcactcacacctgactgcccttggccagcacgatgggatacgagctgtgtcccatcagcgtccggtccggcaggatttctacatttttatccgcgatcagatgggacaccgccgcgccccggcgcaccgccgtctccttgaagagcacgcagttgcgcaccacagcgccggcctccaccaccacgccggggaagaggatggagttctccaccacgccctcgatgttgcagccgtctgcgatcagggagttctcgcagtagccgtcgggtccgatgtaggcggaggacttgtcagtggccttggcccggatgggccgctcggcacagaacagctccgcccggatggccgggtccagcagctgcatactgcggtcgtaatactcctgtacagagcggatctgcgccgcgaagccgccccagatgtatccctggagcttcaggctgtccttccgggcctggagcacgtcccgccgcaggctgtactgatcccgggtggcgcactcgtccaccagatccagcagcagcctggtggagaggatgtacacttccagcccccggtagcccctgggccggtggaggtgatacaacacatccgtgacgcggccggtgccgtccagctcaaaataggtgccgttctccgtctcaaagctgtcgttgccgcagactacggtgatgtccgcgccggacttgatgtgctggtcatagatgtcggacaggggcaggttcaccaccaggtcgccgtccataagcaccacatagtcccggcggatctcctccagataggagcggacgcccgccagggcctccatcttgccccggaagaccgccgcctcgccccagtgctgcttgtatgcaaaggggggcaggatcttcaagccgccccgcttgcgggacaggtcccagtccttgccggtgcccaagtggtccagcaggctctgataatggccgtgaagcaccacacccacgtccgtgacaccggcgttcaccaggttggacagggcgaagtccaccgcccggtacctcccgccgaaggggatggacgacgcggagcggatctcccccagctcccgcaggtcattgcgcttttcataggaaaagatgatcccgtgcatgccgttcatctggacacctcctcgccgttcttgttcagcatcacgccggggcgcacccgcttctcatcctccaggacgcagcccggcgccagcaccgtcaggccccagggatccggcgccgtctcctccggcgtgccgcccaggcagcagttgcggccgatgcggcagccctcgcccaggatagcgtattccaccacggcgccgggctccacggtcaccccggggaacaggacggagtaggacacccgggccccctcccccacggtgacattgggagccaggacggagttctccaccgtcccctccagatcgctgccccggttgaaggcactgtggctgatctggcagcggcggcccaaaaaggccggcggcgcgttgacggaccgggcgtaaatgggccaggactcgtccagcaggtccaggcccgactccggggagagcatatccatgttggcgtcccacagggactccagcgtccccacgtccttccagtaaccgctgaagcggtaggcggccatccgttctccatcccccagcatggcggggatcacatttttgccgaagtcattttcggagttggggttggcctcgtcagcctccagataccgccgcagggtcttccaggtgaagacgtagatgcccatggacgctagattgctcttgggctccttgggcttctctgcgaactccgtgatgaggtcgttctcgtccacgctcatgatgccgaagcgggacgcctccgaccacggcacctccatgacggagatcgtgcaggcggcgcccacggccttatggcgctccaccatcttggagtaatccatcttgtagatgtggtcgccggagaggatcaccacatactccgggtcatacaggttgatgaacccgatgttctgatagatggcgttggcggtgcccttgtaccaggtgccgcccttgctgcccatgtagggcggcaggatgtggacgccgccggtggacccgtccaggtcccaaggcacgccgctgccgatgtagctgttcaactccaggggccggtactgggtcagcacgcccacggtgtcgatgccggaattggtgcagttggacaggggaaagtcgatgatgcggtatttcccgccgaagggcacggcgggcttggccatgtcgccggtgaggacgtacaggcggctgccctggccgccggccagcagcatggcgatgcactcttttttcatgtcttttccaactcctttgcctgttgtttcttcctgggtctggggaacgtcccctcgccccgcaggaacaccgcaccgaaggccgggatccggatggcggcggagcattcctttccatgggagggcacggcctccaccatcaccgcctcagaatcgccgaaaccgtcgccgccgtatgcggggtcatcggtattgaacacgggcacataccgcctgtagggcggcacgcccatccgatagttcgtataggtgttgggcgagaagttcaccgcgcacataaggtcgcggcccttcttgtccctgcgcagaaacaccaccacgttgttgtggttgtcgtccggcaccagccattcaaagcccgcccagtcgaagtcgacctcccacaaagccgccgtctttttataaaaggcgttgatctcccggaagaacttccggagcttctgattctctggtcggtccagcaggtaccagtccagctgcccgtcggagtcccactcgtgccactggccgatctccgcccccataaacagcagcttcttccccgggtgggccaggagataggcgtagaagcctctcaggcaccgcagctggttgtcgtagtccccgggcatcttccccacgatggaccccttcatgtggaccacctcatcgtgggagatgggcagcacaaagttctcagaaaaggcatacatcatggagaaggtgatgtccttgtggttgtactggcggaaatagggatccagcttcaaatagtggcacatgtcgttcatccagcccatgttccacttcagattgaagcccaatccccccacgtccggcgggcgggtcaccaggggccaggcggtggactcctcggcgatcatcagcacgcttgggtccgtctggaaggccatggtgttcagctcccgcagaaactcgatggcctccaggttctcgtgtccaccgtactgattgggggtccaggctccgccctggcggtcgtagtccaggtacagcatggaggccaccgcgtccacccgcaggccgtcgatgtggtactcttccagccagaagcgggcggaggagaagagaaagctcttcacctcgggccggccgtagtcgaagacccgggtgccccaggcggcgtgctcccgcttgttgggatcgctgtactcatagcagtaggtgccgtcgaattcgtagaggccctgagcgtccttgcagaagtgggagggcacccagtccagcagcaccaggatgccgtttttatgcatgtggttcacgaaccacatgaagtccttgggcgtgccgaaccgggaggttggggcgaagtacccggtgcactggtagccccaggagtcgtccagggggtgctccgtcaccggcagcagttcgatggcggtgtagcccatatccttcacataggcggccagatccttcgccaggtccttgtagtcgatgaagtccccgtttccccgctttttccaggagcccagatggacctcatagatattcagcggtgatgtatagaccgggtgcttggccttcttctcccggaaagcgccgtccgtccacttgaatccgctgatgtcatacagcttgctggctgtcgccggccgggtctctgtgtggaagccgtaggggtccgccttctggcggacctggccgtccgccccccgcaccgcatatttataggaagtatagaccggcaggtccggcagaaagccctcccagatctcgcccttacgggcgaggggggccgctccctcctcccagtcgttgaagtcgcccacgacggacaccgcctccgcatggggggcccagacccggaacgtccagccatctctgccccgctttttggcagggtgggcgccgaaccagcgccagccgtccgtcatcgtcccctggtggaaacggtccgcctgtccttgttttgccatggcagcagctcctctccccgccgcggagtatccccggcaggctcgtcattcttagagtaaagcgtttgcgcggaatctggatatgcatataattgtttatattatacttcctgggaaaaataccgtcaaggatggtcctgtcgaaaaagggcggcacaagttggtgggatttcccagttttttcccgtattttcacaagaatgtttggtgctttttgtgggattggtcaggatttttcccggaactttccgctttttaatctcgtctgaacagaggaaaaattttccgcccgtgttgggcggaacggaaaggaagaatcccatgaaatcccgctctctgttctgtgcggcactggccgtgctgctgctcctgctctccgcctgcggtcatccggcaccagaggccagcggagccgcagcggaagggctctccgccacggacaccatcacgccggaggaaggcgtcgccattctggaaaagcaactgggcgcagtggacgaggccaccggcaatgtgatgtcctacggctacgaagggccgcttactctggacggagtggactattacaactaccgggtctcctggctggtggacggcgatcacctgtcctatctcaccaactatctggtatccaccgacgggctggtggtccaggagtacctgccggagacggattgattgccaaatgaaaccacccgccgggcctgcatagccaaacaaatcctgcggatactagcttttgccaagcagaatcatcctgaaaaatctgaaagacaaaaggagttttcgatatgaaggcaactggaatcgtgcggcggatcgacgacctgggccgggtggtaatccccaaggagatccggcgcaccatgcggatccgggagggcgatccattggaaatctacaccagccgcgagggtgaggtcatcttcaagaaatactcgctgctgggcggtgtggaggacttcgccgcggagctctgcgagaccatgagccggtccaccggcagcgtctgcgccgtcacggaccgggacacggtcatcgccgtggcgggcggcagcaagcgggagcttatgggcaagcggatcaccccggagctggagcagatcatggagagtcggaaaatctaccagtacaccggcgagggccagcccctccaggtgacggagggcatcgacagcctgctgaccaccgtggcggcccccatcctggcggagggcgacctgctgggcctggtgctgttcatctccagcgatcccgctgccgtcaccggcgacaccgagtacaagctggcccagaccatcgccgcctttctgggccggcacatggagagctgaatcctctctcccgcgcggacgcctgtacaggcgtccgcgtttttgatggcatgaaatgccggaaagacgctatgctggaagtatcccccaattcggaaggagctgcttccatgacagtttcagagtggatcgcgtatgtggaccagcgggtctggggcccgggaatgctggtgctgctgatgggcaccggcgtcttcctcaccctgcgcacccgctttctcccctggcggaacctgggctgggcgctgaaaagtgttctcggccgtgactcccgcgccaaggcaggcggggccggcgatgtgtcccccttctccgccctgatgaccacgctggccgccaccatcggtaccggaaacatcgtgggcgtggccacggccttggtggcgggcggccccggcgccttggtgtggatggagatctccgccctcttcggcctttcctccaagtgcgcggagtgcctgctggccgtcaagtaccgccagcgggacgccggcggcgaaatgcgcggcggccccatgtataccatgtgcgccgccctgcggtggaagcggctgggaggtgccctggcctttctcttcgccctcttcacagttctggcctccctgggcatgggggacatggcccaggccaattccatcgccggggcgctggccgacagcttctccgttccggcccggaccaccggggtggcagtggctctgctggctctcgtggtcattctgggcggtatccggcggattgccggagtctgctccgtggtggtgcccctcatggcggtcctttacctgctggcgggcaccgcagtgctgctggggcatctgtccgctctgcccggagccgtggcagagatgttccgcctggccttctctcccgccgccgctgcgggtggcgcggcggggactatgaccgcctccgccctgaacgccgctcgctggggcattgccagaggctgcttttcccacgaggcgggcatgggctccgccgccatccctgctgcctccgccgccacagacagccccgcccgccaggggtatgtgaacatgaccggcgtattcttcgacaccacagtgatctgcacagtcacgggcctgtgcatctgcgcctccggcgtgctggggactgccgacgcttccggcgggcaggtaaacggcgtggccctcaccgccctggcctttaagaccgtgctgggccccctgggggggctgctggtctccctggggatcgtgctgttcgccttctccaccatcctgggatgggagttctgcggggaaacggcctttgcatttctcttcggccgccgggccatccctctctatcgaattctcttcgccctggcggcctttctgggcgccactcagagcctggaggtggtatggaatctctccgacatcttcaacgccctgatggcagtgcccaacctgatctccctgctcctcctctccggcaccgccgcccgggagctggaggccttccagccggagatccgccgcgggcggagactccggcagaggcgggccgtccggcgggcactctgagtccgctttcttcaggtgccaccgacgggggccgcctgcccctgccggcatgtccgggaccgtgtgcaggtccgtctccccattcggatgggaaatggcggaattcgtgaatttttttctggaggagttgcttttttccagtttgatggtaagataaagtacggtaaaaattttaaacaaaggacttgataccatgaccaaaattgatattgtctccggcttccttggcgccggcaagaccactcttatcaaaaagttgctggcggaggcctttcccggcgaaaagctggtgctgatcgagaacgagttcggcgagatcagcattgacggcggctttctgaaggagtccggcgtgcagatcagcgagatgtccgccgggtgcatctgctgctccctggtgggggacttccacaaggcgttgaaggacgtgcaggctcagttccacccggaccgcatcctcatcgagccctccggcgtgggcaagctgtccgacgtgatcgtggcggtgcagaacaccgccgatgagaccgacgacatgaagctgaacagcttcgtcaccgtggcggacgccaccaaggtgaaggtctacatgaagaacttcggcgagttctacaacaaccagatcgaggccgccggcaccatcatcctctcccggacccagaagatgagccaggagaagctggaggccgccgtggccatgctgcgggagaagaacgccgacgccgccatcctcaccaccccctgggaccagctggacggcaagaccatcctggcggccattgaaaaggtgtccctggcggacgagctgctggggaagatgcgcgccgagcacgccgccgatgaggcggagcacgagcatgcgcatcaccaccatgaccacgagcatgcgcatgaggagcacgaacaccatcacgatcatgaccatcacgaccacgaggagcatgaccaccatcacgatcacgatgaacacgcgcatcaccatgaccacgaccacgagtgcgacgatcccaactgctcctgccaccaccatcaccaccacgccgacgaggtgttcacctcctggggcaaagagacccccaaggtgtttgcccaggcggacattgagcggatcctcacggccctggactccggcgactacggcaagatcctgcgggccaagggcatcgtgaacggcgagggcggcaagtggatcgagttcgacttcgtccccgaggagcatgaggtccgggcaggccatcccgactacaccggccggctgtgtgtcatcggcgccgagctgcaggaggacaagctctcccagctcttcggtctgtgaactcttttcttgaaagactgtaaccacacttgatattgctgcacaaaatcaagtggagtccgtccccgaagtagggaaaagagccaaaagagcttcagcgcgccgcggtggccggtgtgagggactgtcagagtcgaaagtcagatttcctgctgtccgggcgcccgttccgcgtattttacccgaaaggaaatgcacattataatggcagacattcctgtttatctggtggccggctttctggatgccggcaagaccaatttcatcaacggcatcctggaggacggcttcgcccgccaggatcccaccctgctgctctgctgcgaagagggcgaggaggagtacgagaaaaacgctttggacaacgtgacggtcatcaccattgaggacgaggaggacctgaagtgctcctacctgaaggagctggagaaagagtaccaccccaaacaggtgctgatcgagtacaacggcatgtggcagatggagcggctgtaccgggaggttctgcccgccaactgggtgctgtaccagatcatgaccttcgtctacgcccccacctttgagatgtacgccaagaatatgggccagctgatgatggagaaaatcaccaacgcggacatgctggtgttcaaccgctgtacgccggagctgcgggacgccctgcggaagcggaaccttcggatggtgaaccgtcgggctgacatttacctggagatggaggacggcaccagcgaggactacctcaccggcgacgagtgccccttcgacctgagccaggacctgatcgacgtgccggacgacgacttcggtgtgtggtatgtggacgtgatggatcacccggaccgctgggcgggcaagatggtccacatgaagcttatcatgtgccactccaagaagtacccgggcatccactgccccggccgctttgtcatgacctgctgtgagaacgacatccagttcatgggtctcatcgccaagggcatgaacctgaaccagtaccagaaccgggactgggtggaggtcaccggccggatggcggtggagaagcacgccgcttacaagggcaaggggccggtgatgcatgtgatctccatcgggccctgtgagaagccccagcaagaagtcgtgacgttctaagaggggagcgggctcccctcctaaccaccctaccaccagtctgcggactggtgtgtgcccaaggcgcacggatcaacgtattttcggcaggcgcatgtcctgccgaaaatggatccgaatttcttcgaaattcgatacggggtgtataaccttgctgcaaaaatcccctccgttgttgaacggaggggatttttgtcttatgcgagaccaagcgcccaaggattctcatcgggcaggccccggcccgtctcccagcggctcacggccttgtccgtcacgtggagccgttccgtcagttccccctggctccagttcttctcttttcggcgccgggcgatcagcccgccggtggcttttgcgtccatgccatccgctccttttccagccatatcataccacaaaactgtctcaaaggcactctacacttcgcaggagccttgcttttttccggaaaatccttataatggaggtattctgtgtgtgtggaaatccaaccagaaaggaccgtctgctcttgaagctccatgaccattttcccaaagtccgactgcccctgtgggccacgcttctggccgctgtgctgctggcgggcgccatcactctgctggcgctctggtgccagcccaatgccctgcggagcgtcctggccgtcttccgggcgcagccgctgctgattatcctgaactgcctgccggtggggatgctgctgctggtgttcacctgcctgctccggaacgtgttcttcgccggggcgctggcgaacttcgccgtctgcgccctgtctatcgccaaccgcatcaagatcgaggtacgggacgagccggtgtttccccgggactttgccctgctgaaagaagcgggcagcgctgtggggacttacgacatccagttcccggtgccgtccatcgccgccgtcgtggtgttctcgctggtgctggtggccctggggcttttcgtaggcagccgccccttccccatcgcccggctccgcggctgggtgggaagcctgctgggggctgccgccagctttgccgtgctggcaggactgatcctgacagtctatgcctccaatgatctgtacaactccttccgggtatccaacgcctactatattccctccgtgttcaacgagctggggttcccctactgcttctgccaccagttcaccacctacccggtggacaagcctgagggcttcagtcggtcggaggcggccggctgggaccagggcggcgacaccggtctggggaaggatgtgaacgtcattatggtgatggatgaggccttctccgatatcacggacagcgacgctttcgctttcacagcggagaacgaccccctgcccaacctccacgccctgcgggaggatccccacgccgtcgccggccatatcgtggtgcccggcttcgccggcggcactgccaacacggaattcgacgtgctgacaggcatgcagaccaacgcgctcgctgccggaacgacctcctccttccgggtggtaaaccggaacctggacagcctcttccgggtgtttggcggcgatggctaccacacctccttcttccacccgggggacgactggttttacaaccgggagaacgtctaccgctggttcggggcggaggagaccgtatttgctgaccagatggaggcgcttgcatacaagggccgctgggtcacggatgactacatggcgggcctgattgaacaggaattcgcggacactgtggccgctggcgagacgctgttccactacacaaccaccattcagaaccacatgtcctacaccctggacaagtacggcgagagctatgcctatccggaggtgccgctgaacacggcggtgtccgacgaggtggagacgctgctgagagtctacaccgaaggggctcgggacgcggacgccatgctgggccgcctggtggacaccttctccgccgtggaggagccggtggtgctggtgttcttcggagaccatctgccctatctgggcgacaaccagctggcctacgcggaactgggcttcacggcccggccggagtgggacgcactgacctcctacgagacgccctatgtgatctgggccaatgacgccgccgcgcaggccctggactgggaggccgccgtagcgtccctggacctgccggaggatgggcggctctccgccagcttcctgggggccgcggtgctggagctcaccgggcggaccggggagagcccctggttcgactttctgaaccagctgcgccgggagctgcctgtggtgcagaagcaggcgtatcagctggcagacggcacagtgacggaccagctgacggaggaacaggcggcgaagatcgccaaatggcgtcagtggagctactacaagctgatgtataaggagatcgactgaaaacggcccccggtggacagtgtccgccgggggccgttcttttcttgacaggtctgactgcccttgatacaatggagaaaagccccatcttttgaaaggatgtgcgccccatgaagtcctggtctcaacgggaactggcgctggctgtgctggtggtctttgccgcaccggctatcccctatgtcacctcccgcttgctgggggatttgtcgtctcttttccttgggacagttcctctcatagggacgctcttgtctctgttcctctacgcttgtatctctgccctggtgacggggggccgttttttctctgggcccggagaggccgccggatctggccctgggtcttggctctggcggtctgcctgggtctattccgtcttttgtgtatagacataaatgccactaacaatctgctggcacttgttactggctatcacaacaatgagtccaccgctttccacctgctctacctacgggtatgctacagcggaatgctgtttggggtggccttggcggccattgtcgcctggttccttcgcaaaatcaactcctgacaagaaagccgcccggagccgttggctccgggcggttcggtgtggagctcccgcccctgatggatcgggacattggccggcccatggaaagctaggccgtgtggaattccggcccggaatcccgtgctcctttgcctacatcccctccagcggttgcagctccgttccttccgggaaggccccggcataggagacgcctaccgcatccagcagctccagccgcatccggcagaaactcccgccgccggtgatgcagaacacgttttccccctgccgcagcgtcaccggccagttgctccagatggcgccgtatgcctcctccgatgccccctgcagttcccaggactccccaccggccagacacaccgtcaccggctggtcctgggaggcataggtgcagttcaccgtggtcgtgcaatcctcctccacggcgacatagagaaacgccgccggttcctgccgggtggtcagggagaattctgccgtgatcggatcatcggcaaccgtcagggtttcaaactgcggccctgccggggtctcggcggtctctttccgttctgtctctggaaacgccgacagatcctccggaatatcttccaggcggccgcaagccgccatgagaaagcagcagatcaggatcaaaacacagtgttccttcttcatgaaaataccagtcctttcctcacgctctgtttatcaaacgaaatggctgcatccttttcctcatctcccgcaaaaaagccagcggctgtgccgctggctttcagacgttctcgtttttcgggtgaaaatgttcccacaccgcctgggcggcggcccggggcaccacggcggcaagggtctccacatccgcctcccggatggccttgatggtgccgaagtgtttccgcagctccgcccgccgcttctcgcccacaccggggataccgtccagggcggagcgggtggcgcttttgctgtggctctcgtggtggtaggtgatggcaaagcggtgggtctcctcctggatctggccgatgagggagaacaccgcctgctgggtgacgatgccgatctcccggccctccggcgtcaccagggcccgggttcggtggcggtcatccttcaccatgccgaagatgggcacatccacaccgaattcccaggccaccgtctgcgctgcccgggcgtgggtctcgccgccgtcgatcagaaacacgtccggcaggggcagaaacttctcgtccccatccgctgcccgctggagccgtcggcgcagcacctcctgcacggaggcgtagtcatccggatgtccctccaaagactggatgcggaaacggcggtaggcggacttcagcggccgggtgccgctgtataccaccatggaggccacgatgtcgctctttcccgtgttggagatgtcgaaggactccatccgcttcggaggctccggcagattcagcatcttccccagcagctccagggtgtaggcagtccgctcctccacggtggtggctcgctctgtctcctcctgggcgttccgctgggccatggcccgcagctccgccttctctccccgctggggcacgtggacccataccttgtggcccgcccgcttcgtcaggacctccgacagctcttcgcagtcctccgtctccatgggcagcaggatctcgtggggcaggatggcccggggaaggtagtactgggccgtcagggcggagagcatctcggcctccgactcctcgttgggggcggagaacagctccgtctcccggccggccagatttccctcctccatgtggagaatggcgtaacagctcttgccggatccccggtacagtccccagatgtccgtatcggcacagaggcccgcgatcaccgtctgctttttgctgagggcaccgatggcgttaatccggtcccggagcagcgccgcctgctcgaagtggagggcctccgcctccgcctccatctcggcggtcatgtcccggagcagctgcttgctcctcccctccagcagctgcaccgcctgctcgatccggcggttatacgcttctgctgtcatctccggccggcagaatccgtcgcaccggcccatgtggaagttcagacaggggcgctctgccccgatatcccgtgggaatttccggctgcaggtaggcaaccgcagggccacacacaccgcgtccagggcctggcgggtctcgaaccgaccgccgaagggcccaaagtaccgggcggagtcattggccatcttgttcaccagggagaagcgggggtatgcctctttggacaggcggacgaaggggtaccccttgtcgtccttcagcaggatgttgtagcggggcatgtgccgcttgataagggagttctccagcaccagggcctcgaactcgctggtgacgaagatggtgtcgaagcggtccacctgagacaccatgttccgcgtcttggcggtgtgggaggcgctgtcctggaaatactggctcacccggtttttcagcttcttggccttgcccacgtagatgaccctgcctgttttatccatcatcaaatagacgcccggcaccagtggcaggtcgttggccttctcccgcagctcttcctttgtcacgcccgccgcctcctcgcataaaagatacacggccttgcgcgccgcagggccgtgtcgtacttcctgtatcgaatgtgttattcgccgaagttgtccttgaccagttccaccaacgcctcgacagcctctttctcatcggcgccgtcggcgatcaacgtaatggtggtgcccttcacgatgcccagggacagaacgcccagcaggctcttggcattgacgcggcgatcctccttttcaacccagatgccgctcttgaactcatttgctttctggataaagaacgtggccggtcttgcgtgcagacctacctcattatttacggtgatctcctgtgtatacatgatccagctctccttttctataccaagtcaaccaagtctgttccaacagctccacatgataaccgatgatttttctgataacatcatacccggttttacacagacagtcaacggcgtttttcacaaacattttaaaatttccaggaaaccgtacacagtcttttcgtcttttagcctatctttcacaattttccggcagttaccccctcttttttatctatttctacaagggcggctggagacgcagacaggggacctcccaaaaggaggtcccctgtggacagtgggatcaatagttctcggccttcacctggaagtaggcctgggggtgcttgcacaccgggcacaccgccggcgcgctctcggcgatctccacatggccgcagttgcggcagaaccacatgaccttctcgcccttcttgaagacctcgcccttcttcaggttgtccagcagctttaagtacctctcctcgtgggtcttctcgatcttggccacgccctcgaactgggcggccagcgccaggaagccctcctcctcggcggtcttcgccatctcggcgtacatcttggtccattcctcgttctcgcctgcagcggcagccaccaggttctcctcagtgctgccgatgccgtccagggccttgaaccacagcttggcgtgctccttctcattcagagcggtttcctggaagatggccgcgatctgctcgtagccctctttcttggccttgctggcaaaatagtcgtacttgttccgggcctgggactccccggcgaacgcgatccacagattggcttccgtcttgctgcccttcagttccatgtgtctgactcctttcaaattttacaattgtctcttttttcctctggtctatactcatgccggccgtcctgtcccgcacagcgcgggcagtgtccggtgaatatcagggtgtggcccgtgaccacgcagccccgggccgcagccagacggtccagcctctcgtcatagggcacagtctccagatccagcacagccccgcaggcgcggcagcggaaatgggtatggggccgagtcaccgcgtcaaagcgggtcacagggccgtccagctctgtcaaccgcccctcccgggccatctgctggagattgcggtacacggtccccaggctcagccggggcatctccggcttcagctgctgatagaccatctccgccgtgggatgggcgcggctctccagcacagtctggtagatccgctcccgctgctgggaaaaacgctgcggcataggctttcttccttaaatagtaataattactattatttatatatcatatcctgctggaaaatgcaagcactttttcaaaattcggacaacattcgactgtccggcgctggcggaaacttccgctgctaaatccagacgccacggagacaataacacctgggtatcgcgaaacaaacgcccgcgcaaagggaggtcaacccatgaaaagacagtttacgctcttgctggcctctgtcctggtggtgtttgccctgaccgcctgcggcggcaacgacaaagacaccaaccaagataacaacggccaaaacacggtcggagaggatatccagaacgctggcgaagacatcatggatgccggcgaggacatcctggaccccgacaacaacaatagcaacaaggacaacgggaccggcgatcacaagaacgaccagaacaccaccgacagaggtgacagtgccctcaccggcggcgacaccaccgtggaggatgccgtcaccaagcagaacagccgtcccggcgtatcctacggacaaatgctgcgcaatgcccgggtccacgattccgacgggcttctgacggaccacgaaaatgccgccagcggccgcacagcataaaaacggacagagaagcgttttgcctgcttgaacaggaagacggcgcgcagaaaacacacagggccgcggcaacagctgcggccctgtctttttccgaaagggcttgggaaggtccttgccttttccagggaacatggtacaataaggcaaagcatacattttgtggaaaaggagccgctatgagcactgtgaaagaacccctccaccccctgaggacagcccggtacctgtggctgggcatccttctctgcgccctggtgggcggcgcctgctttctgggcgggcggtggtccgccggccggtctgagacagcgaaaatagacacggtcgtcctgcagaatcagctgtcggagatccgggagctggccacggtcacctacgcctacaccaacatggcccagttcgagagcagcaacgacttctacggggtgaaaatccccttcaccaccaagtccttcatccttacctacgacggcaccgtcaaggccggggtggacctggacggggcggaggtgtccgtcagcggcaccacggtcaccatcacactgccggaggcggagatcctctcccacgagatcgatgaggacagcatggaggtgttcgacgagaagacctccatcttcaatcccttcacagtggaggatttcacctccttccagtcggatcagaaggcagccatggaggaaaaggccctgtcccgcgggcttctggcggaggctcgcgccaaagccgtctccagcgtagagcagctgtttgccgccgcactgccggacacatacaccgtcacggtccaataaaaaacagaggcggagccgcggctccgcctcttctcatgccaggatatagtccccagggcctccggcgtgtccgccagatggtccgccccggcgtcctccagctcctgccggctccgaaatccccaggtgacgccgcaggccgtcaggccgccgttgtgggccgtttgcatatccacgccgctgtctcccacaaacaacgtctcctccgggcgcactgccaggtcggccagcagagcgtggatgcccgccgggtccggcttcaccggcactcccttgacttggccccgcaccagatggaagacaccgggaaagtagtgttccacgatctcccggcaaaagccgtccgccttgttggagtaaaccgccagggtcactccccgtctccccagccgctccagcagtgccgggatgccgtcatagggccgtgtctcgtccatgttgtgggcgccgtaataggcggaaaactgggcgagagtattggccagcagcaggggactgcggctcttctccggagaaaaccgccgcaccagattggggattccatggcccaccatggtcttgaactcctctgcggagtactccggccagccgttccggcggcagacccagtttccggcattggtcaggtcctgaatcgtgtccagcagggtgccgtccaggtcaaagatcactgtatgatacatggcccgtctcctttgttcttcggtaagattgtttttattttatcaatttctccgcaccgctacaactggcattcaaaccgaaaggcgcggttttcaccgcgccttttttatgaaagtttcccgtcatttcacagggggcagggcttccaacccctcccggtcagcagaacacattcccggaaacccgccgctcttgccagctccgccgcctggccgtagccgtacacgaccgtttccgggctgtgggcgtcggcggtgaggatgatctgtcctcccatgccccgccactcccgcagaaggaacaccgccggatagggcgtgtcccggtatccccgggagatggcgccggtgttgacctccagcagcgtggcatccgggtccgtgtggtgcagggcctccagcgccgccgtgcggcagcggggatcgtcctcgtcaaacagggcatttccccgattcagcttggtcaccaggtcaatgtggcccagaatggcgggtcttcggtccgccatggcggctacatcccggtagtagccctctgtcagggccagcatatcgccgccgaacatctggtcccggcaggcgatcagccgctcccggtcccagtctatgccatggtacttcccggtcttcgggtcatagaggttgtggacggagccgatccagtagtccgcccagtccggaaccggctgtgcggaccggctgtcctgctcgatacccagcaggacctccatctgtccggcgtattcctcccggaggcgtagcacctgctcccggtattccgccggatcggttggcaggacgttgcccgcgtcgtgggggatctccgtgtggctgtggccggaggcgccgaagaagcggacccctgccgcatacgcggccgcagccatctccgccagggttcccttcccgtcgcagagaacggagtgggtgtggacggagcagcattccggtgtcagattcattgcatccgctcctgcttcaccttgtggtcgatgacatggcgcttctccaactccgccatcacgtcctccagggtgatgcccatctggaccatcagcaccatcacatggtaggtcaggtcggcgatctcatagatggtctcctccctgtcctccttgcggccgccgatgatgacctcggtgcactcctcacccaccttcttcaggatcttgtccaggcccttttcaaaaagataagtggtgtagctgccctccttgggatcggtcttccgcccttggatcaagcggtacaggccctcatagctgaaagccttcaactcctcggagaggtagaccggccggaagaagcagctctccgccccggtgtggcaggcggggccgtccttcaccacctccaccaccagggcgtccttgtcacagtccgcggtgatggacaccacatgctggacgttgccggaggtctcccccttgcgccagagctgctggcggctgcgggagaagaagcaggtccggccctcgtcaatggtgatggccaggctctctgcgttcatgtaggccagggtcaggacctccttggtgtagtggtcctggacgatggcggggatcaggccgtttgcgtcaaatttcaaatccatggtgctgtctccttttcttgggtatgccgcccgtgggcggctgggactccgcttcccgtccgggaccgggcgttctgtcagatccgcatctccacgccttgcgcccgcagatagtgcttcagctccttgatatccacctgccgggtgtggaagatggacgccgccagccccgcatcgatgccggggtgggtgaagagctgggcaaagtcctccattttcccggcgccgccgctggcgatgatgggcacgctcacccgtgatgccagggcgtccagcatctccaggtcaaagccctgcttgacgccgtcggtgtcgatggagttcaacacgatctccccggcgccgtcggccacgccccgggcggcccactccatagcgtcgatgccggtgtcctcccggccgcccttggcgaagaggcggaactgcccgtccacccgcttcacgtccatactgagcaccacgcactggtcgccgtacttcttggctgccgcgccgatgatggtggggtccgcgatggcgccggagttgacgctcaccttgtcggcgccgcatttcaagacccggtcaaagtcctccagcgtccggatgccgccccctaccgtcaggggaatgaaaatctcgcccgcaacccgccgcaggatgtccgtaaacaggttccggccctccgcagaggcggtgatgtcatagaataccagctcgtccgccccggattcgttgtagaaccgggccatctccaccgggtctgccatatcccgcagaccctcaaagttggtccccttcaccacccggccgtccttcacgtccaggcaggggatgatccgcctggctaacatgcgcccacctcccggatgaccgtttttaaatccagacggcccgtgtacagggccttgcccagaatggcggctttggccccgatcttccggagctcccgcagctcctccagactgctgacgccgccggaggcggtgatgtccaggccctcaatttttgccagctcccggtagagcgccagattggtgccctgttccgccccatcccggctgatgtccgtatagatgacggtctggacgcccgcgtcccggaggcggcggcaaaagtccacgcccttttccgcagacagctccttccagccgctgacggccacgtagccgtcccgggcgtccacccccacggcgatccggtcgccgtatgtttgggccatccgctccgtgaagtcgaaatccttcaccgcgatggtgcccaggatgcaccggcccacacccagatccaggtaccggcggatgcggtcctcgtcccggattccgccgcccacctcgatgtagaggccaccctgtccggcaatggcggcgatggtgtcaaagttggccagggtgccgtccttggcgccgtccaggtccaccacatggaggtatccggcaccggcagcgatgaagtcccgggccacggcgcaggggtcctgggcgtagaccgtctctttgtcatagtctccctgatacaggcggaccacctgtccgccccgcaggtcaatggcgggaaaaatctgcatagaccacgtctcctctgtcaatctttgttcttgttgtccagaagcaccagcaccagaccgatgatcccacagagcagacccaccggggcccaataggcccgcatccaactaagaatcgtgagcgcagggggctcaaatccgaccaataccagcagaatgccgaacaggatccaggcaaaacccagccagatccgcctcatgccgtctcctcccaatctaattataggtgctccttgcaggagagctcctccgcatccagccgcaggacgcacacggcgtccaccgccgcgtccggaaaggtccagtccccgcagcaggtagcctggcgcatgatagccgccagaccccgccgcctctcttccgccgtctctaccacacggatggggccctcgccgatgacgctttgaaacgcggcggtgtagccgcaggccgcctccgcccctgaagccggtagccggtgtccagctcgaacccggcccagccgtttcggcggaccaggtccaccttccgcccctccgcggcgccgtggaagtaaaagacatggcggccgccctccaccgtgtggccgaagttcaccggcaccacgtagacgcctctgccgtcctgaaggcccaggcggcagacttcacatgcgtcgataaccgcccggaccttctccggagccgtgacggccctgtcctgtcgtctcataggtctcatggcatcctccctcacagttctgcaaaggcccgcagcaaccgcagtcccgtgtccccggatttctccgggtggaactgggtgccgtagacgtttccccggcgcaccacaccggtgacatccacattgccgtaccgggacgcggccagagtgccggcggcgcagtcccgggcatagaagctgtggacgtaatacacatactctccgtcccggacgtggcggaacagggggtcatctttcaaaatctgcaagctgttccagcccatgtgggggaccttcagcgtcttgtccgtcaggtcccggcggaggtccactacttggccgggcaccagccccaggccggggtgctccccgtactcaaagctcttgtcaaacagcagctgcatccccaggcagatgcccaggagaggcttcttctccgcctcctcctgaatcaccggcaccaagccggtggcatccagcttggcgcgggcgtccccaaaggcgcccacgccgggcaggatgatccggtctgccgcccggaggcggccggcgtcgccggtgacctccgcctccaggtccagggccctcaggctggagagcagagagaacaagttccccacgccgtagtctacaattgcaatcatttacagcacacccttcgtgctgggaatttcatcccggtgtttttcgtccggggccacagccatcttcaaggcccggcccgcgcccttgaacacggcctccagaatgtggtgggtgttctccccggccatctgccggatgtggagggacatggggcacgcccggacgaaggccaggaagaactccttgcccagctccgtatcgaagtcccccaccctttgggcgggcaggtccacggaccagcccagatagtcccggccggaaaggtcgcaggccaccagcaccagcgtctcgtccatgggcaggaggaactggccgtagcgcgtgataccccgcttgtcccccagagcctctgcaaaggcccggcccaggcagatgccgatgtcctccacgctgtggtggccgtccacctgggtgtccccctggcagcggatggtcaggtcaaaatccccatgccgggcgaacagctccagcatgtggtccaggaaccccacgccggtggcgatgtccgccttcccagtgccgtccaggtttaaagagagctggatccgggtctcccgggtgtcccgcctgatatcagcagtgcgcatctctccgcctccttacagctcttccaggatggccgtcagctcctccaccagggtctccatctgctccatggatccgatggtaatgcggatatagtcccggatccggtccgcgtcgaaccagcggaccaggacgccgttctccttcagcttccggtacagggtctcgccgggaagctggctgtggcgggcaaagacgaagttggcctgggagggcaggacagtgaaacccaaattctccagctctcccacggtccaggcccgggtctgccggatggcagcggtgcaggcggcgaagtacgcctcgtccgccacagcggcggcccctgccgcgatggacagccggtttacattgtagggatggaagctgtatttcacccggttcaggtccgcgatcaactccgggctgcccaatgcgtagcccacccgaccgccggccagggaccggctcttggacatagtctgggtcaccagcaggttgtcataacggtagatcatgggcacgcagctctcggcgccgaagtccacatacgcctcgtccacgatcaccactcggtctgggttcgcctccagcagccgctggatgtcgttccggggcacggcaataccggtgggggcattggggttggcgatgacaatggtgccggggaaatccatatagtcgtccacatgtaaggtgaagtcctcccgcagggggattatcttcacatccagatcgaacagggcagcctgggacttatagaacccataggtaacatccgcaaaggccacgggttgccccgctccgcagaaggcccggaaggcaaaggccagcacctcgtcagagccgttgcccgccagcacgttcttggctttcagctcatagcgcctggcgatggcctccgtcagcgcggcacaggtggggtcggagtacaggttcagtttcaggatctccgcccggttgatggccttgagaaccttgggcgacggggggaaggggctctcattggtgttcagctttacatactgctgatcctggggctgctcgccgggggtgtagggggcaaggcgctccgcctcctgggaaatccagcggctcatgggatcactctcctttctcttccgtgcgggacagggcagaccgggcgtggccgtggaggccctcccgctctgcaaagtccgcgatccggggggcggcgtctgccagcgcctcccgggtgtagtagatgaactgggtcttcttcacaaagtcgtctacgctgaggggactggaaaaccgggccgtaccgctggtgggcagggtgtggttgggacccgcgaaatagtcccccagcgcctctggcgtgtggcggcccagaaaaacgctgccggcgtttttgaccaggggcagcagggcaaagggatcgtccacgcacaactccagatgctccggagcgatgcggttggcggcctccactgccgcggccaggtcctttgtcaccaggatcttaccgttggcctccaaggacttttgagcgatatctcgccggggcaggtccgtcagctggcgctccacctcgttttggacggcctccgccagggggcggctgtccgtcaccagcacggcggcggcgtgggcgtcgtgctccgcctggctcaacaggtccgccgccacccaggcggggtcgctcttcccgtccgccaccaccaggatctcactggggccggcgatcatgtcgatgtccacctgtccgaacaccttccgcttggcggcagccacaaagacgccgccgggacccacgatcttgtccacctgggggactgtctccgtgccgtaggccagggccgccaccgcctgggcgccgccgatcttgaacacccggtccgccccggcgatttttaccgctgccagagcttctgcagagatggcgccgttttggttcggcggcgtcaccaccgcgatctcttttaccccggcgatcctggcagggatgacgttcatcaaaatggtggagggaaaagccaccgggctgccgggtacgcagatgcccacccgctcgacaggcgtgtatcgctggcccagcaccacgccgggccggtccgtcaggcagaagtcccggtggacctgtgcctcatggaagtgccggatattgtccgccgcctgccgcagcgtctcccggaaattcccgtccacacagtcccaggcggcgcgcagctcctccgccgtcacctcaaaccgctccagatctgcgccgtcgaaccggcgggtgtattcccgcagggcctcatcccccgggtgcggacgtccgccagaatggcggccaccgccgcatccacatcctcctccgcctgggggggcggtcaaagaggggcaggtcctccaggcggtccgcctcatagatgggaatcatgcctccgtcacctccttcagcctgcccagaagcgcctcgatctcctggtgcttgaactggtagctggcccggttggcgatgaagcgggccgagatgggcatgaactccgtcagcaccttcagatcgttctcccgcagggtggtgcccgtctccacgatgtccacaatcacatcagagaggcccaggatgggggccagctcaatggagccgttcagctggatgatgtcgatgtcccggccctgggcggcgtagtaccgcttggcgatattcccgaatttggtggccacccgcagggcccggctctggtcctcggtaaagtctttcggcccggccacgcacatgcggcacctgcccaagcccgtgtccagcagctcatacacatccgcgccggactcggccaggatgtccttgcctacgatgccgatgtccgccgcgccgtgctccacgtagatggccacgtcgctgggcttcaccaagaagtagcggatgcccgcctttcggttctccaccaccagcttccgggtgtcggcgtagttttccgggcagccgtagcccacgcccgccagcaggtcgtaaaccttgtctcccaggcggcccttgggcagggccacgttcagcatcaccaggccagccggctccgccgccgcgtcggacagccggtccagctcgtctaagtacagcgcaaagccgatggcccgggcgccggggcggaactgctccgccagggggtcatactgcccgccccggagcactgcccggggcgctcccgccagatatccctggagcaccaagccgttgtaatactccatatcgttcaccagggagaagtccagcttccagtggtccgtctgcccctggtcctccagcgcccgacacaggccccgcagctcttccagcgccgcccccatggcggcgttcagggccagcacctccgcggcagcaagaacctcctgccagggccctgccagagtccccaggcggcagagtgcgtccgtcccctggcgggagaggcccgcggcctcagcggctttgcgcagctcatggacgtttttgtcccggatgcaggtgaggagcctgggccgcacagcctcctgggcgcccaccgcgtcaaagaggccggtgacgaagcccatgtggctgatctccagcacgaagtcccgcccggtcagggccaggctccgcagggccagggacaccacctgggccgcagcggcatcatccacggcaccgatgcactccaggcccatctgactgatctcccggaaggtatggctctcctggctggggcggtagacgttttcctgatagtagtaccggccgcagccgccgggccccacctgggcattcttggcgatggagagggtcacgtccggcttcagcgccagcagccgcccgtccaggtccgtaaaggtgatgacctgctcgctggaaagaaaacggcggttctcctgatagagaccgtattcctcgaaccgacccatgtggtatttgcggaagccctcctgttcatacagcagccgcagctgcagcgatgcccgctcctggggccgcaggacgttcagatccagttccatggggactctcctcccggcggactatcagcccgcgttgatttcagcatttattttactttattttattagcaaagtaaagcggtaattcggtagtaagaaaaattctatgcttttaacaaattcaacttcgcacaaaacagaagttaacgtgattttacacccaggatggtgtttttgcaatctccctttcccctgttcccgccctgacatttccagccctaaaaatgaaattttcttcatagatagaggatttccgacaaatgctccttttatcatttaaagaaaacccatgattctatggagtatggcaatgaaaagaagtacccctctgacccgcaacatcggcgcgaaagtgaaatactaccggaagctccgcggcctttcccagaagcagctggccgcccagctgcagaccaacggctgcgatatcacggagaccatgctgggccacatcgagacgggctaccgctccacttccatttttgagatcgacaagctggccgaggcgttgaaagtggactacaacgccctgtttgcccaggattaacggcacggtacggagagatctccgcgccgtgccgttttgcttccggtcatccgttgtccagggccacggtgtaggtgaaggagaggcggttgccctcctccaccggctgccagcccatgccttggaagtaacaaaagcctgtctgctccacctctgccgtgatgattacccccggctgatgaagggtgaagccccgctcccagtccgcctcctcctgctcccgcagctgggcctgccgggagagagaccagaaaggcgcctccctgcgcccccagaccagggccgtcacgatttggggcacatagctgtcaggtgtttccacccacatagctgtggtattttggaaggttccggacatggtgaccgctgtgacatggccgtcctccaccgtgtagtggaacgccttggcatcgtcccaggggttcacatccatcaggtcttccagggagatgatctggctgccatcctccggcttttcctgccactggccgtcttcatccagataggccctgccgccaaagtccagatattccgcctggcggttgtagttctccgcgaactccgccacagtcagatcccctctgttgggcggcagctgggaccagctgttgacagcctctcccactatcagcaccaggagtaccgtcaggatcagcgatgcggcgtatcggagccggaagggctttgcggtgtaggccaccccgtcgtcccagggctggggctcctctttccagcaccgccaagcagatcggaggatcatcacaagagacagtatggggatataaaagcccaatcccatccatagcatcatgagatagcgggtcacgccctcgctgtatgggaggttttttccatccattccagccagccgcatccccaacagggcctgcccggcgtggtgccccagagatgcagggacagaggttccaaaacacccagcaggaccacccccgcgaaactgatagccagtgcggcccgagtcgggttataccccagcaggcatagtcccgccaccagcagcatccgcaccagcatctcatcgaacattcgggcgaacagccgccgggaggcgctgcacaccgtaggcagccggtccgtctccggcagggccgaagcagatgccttctcccaccaggggccgccctcccccggcagggccggggcgtccaggtccgccaggtacctccccgggtccaggccggtgaatgtggcgccggtccgccgcaggtcgccgcagacccgctccacccggcccagggcggcctgttcgccgcccacctccgccagccgccggtccagcacggcagaaagttccgccctgccgtcccgcaaggcccgaagcgcctcgatggttactcccagccgccgcagcagcttgatcttctccagggtccgcaggtcctcctcgctgtaatcccggtagccgttaccggaccgggcgggggccagcagcccctccgcctcgtagtagcggatattggcccggggcacgccggaccgggcctccatctccttgctggtcaatgataccgcctcctttggcctcaggataaagtatcaagggacttgacagtcaagcctttttcgcaaaaaagccgcccgccgccggagatttcccggctggacattcccctttgcctctgctatgatggtatcatcttcgccggggctctgcaagaccaccggcagatcaataaaaaggagagactgccatgttcaccccatccgacaagtgcccccgtcgggatgcctgcgtccagaacggcaagggcctcatccacatgaaggacctgacggacaaggagggcctctataaccacggccgcctgttcgcccacgtcaccgtggacccaggctgctccatcggcgaccacccccacgaccatgagaccgagttttactacatcatcaagggcgagggcgtgttcaacgacaatggcaaggagatcgtggtccgccccggcgacatctgcgccaccggctacggcgaggtccacggcctggagaaccggggcacggaacccgtggagctgattgctttaatcgtgggagaataaaaccggatccaagcggccccaggggccgctttttcctgccctgaaaaaaactttcccctccctgaaagttttttccccgccggatcgtatcctgggtgagagcgctccaaaggagttgagatacatggacgatatggaacaggcggagcggctggccaacacatacgccgacgcgatcctccgcctcagttacacctatctgaaaaacacccacgatgcccaggatatctgccagacggtcttcgtgaagctgctgatggagccccgggagtttaagagcccggagcacgagcgggcctacatcctgcggatggcggccaacgcctgcaaggacctgctgaaaagcccctggcggcagcggtcgcaatccctggatgtcggactggaggtccccgccccccaggcgggcgacgggtctgtgctggaggcggtaaatcagctgccgccccactaccgggccgtcatttacctgttctattacgagggttaccaggctgccgagatcggtcaaatcctgggcatccccaccgcaaccgtccacacccggctggcccggggacggacgaagctgaaagaacttttgggaggatatggctatgaacagctcgtttgaatatcaggagtccctgaacagcctgcactttacagaggaggaaaaggccgccatcgcccgccgggccgctgaggcggcgcggaagcagacccggcccgctcgccgccccgtccgccggatagccctgatcgccgctgcggcggtgctggtgctggcagtgggcaccgccggcgccaccggcatcctgcggtccgctgcggaggtcttctctcccctctttggcggggcacccgctcagacggagatcatcgacaagatcggctatcccgtgggcgccagcgacacggacaacggcgtcaccgtcaccgccgacgccgtcatgggcgatgcgtataatgccgttatcgtctacaccatcagtcgggacgacggtacccgcctgctgccggaggacatcacaggcgaaatgctgctggtccacggcaacggcacggacctgagcattctgggcggaagccacggcagcagctattttgtggtggaggatcccgcagccagctccatccagatggtggagacggtcagcgccgacaagcccatcaacgactgcaccgccaccggtgtgttcgagaacctctacaagtgggacgaggaggccggcgaggccgtacccatcatcgagggtaagtggaggctcaagtttgagatgacctacgaggacagctccgtcaccctgagcggcggcgagaccttcacccaggacggcatgaccttcaccatcgactccatcaccctctctcccgtggcctacaaggtggactacaccgtggacagcgaggtggtgtggagcaactccggcagcggccggcaaagcgaagaggaccgcctcaccacacagcggtacttcgaaaacgtggaaatcctgctgaccctcaccgacggcacggtgatcgacctgtctaacgccggcggcagcatcggcccggaggatggcgtcactgtctgctccaagggcgaggtgttctctgaggtcctccccatggaggacatggcctccatctctgtgggcggcgtggtgtacgatctgacagcggagtgagctgaggcattcccaggcaggccgaaccgttccggaagcagcgcagagaactgtgcggccgcctctatcggatggctctcagacgaaggggcccgcactgctctaaattaaaactttgcctgtcctgtcaaaacgttttttgcagaagaaggacccgccggggcacacgccccagcgggtccttatcttttgcagttccggttactggggcgccacgtgctccggctttaccagatccgccagcagctccttcgcccgctccacgtcctccggcttcacggagatgtagtaggtcagccggtcgatcttcccgttggggccgaagtcccggtggtccagcttggcgccgcagccgcacgccggcgcctccgtctcatagaaaccggtctccatgaccttgatgccagcatccttcagccgctgccgggcttccttccaccggggtttgtcgccccagacctcataggccttctcacgctttccgaacagcgccatacgtcagccctccagggacttccaggcagtctccagggcgatctccatcatctcgtggaaggagtcctgccgctcctgggcggagagggactccccggtgaagatgtggtcggagatggtcagcagggacagcgcccgcttccccagccgctgggccgtccagtagaggccagccgtctccatctccagcgccaggatgccgaacttccggtacatggccccggcgtcggggttgtcgttgtagaactggtccgccgtgaacacctgacctacatctgctcggacgcccatggcctccgccgtctccaccgcgtcccggaggagccggaagtcggcggtggcgcacagctggccggggaaccggtactggtcggcgaagtgggagttggtagaggcccccagggcgatgaccacatcccggaccttcacatcatccccgatgccgccggcggagccgatgcggatgatggtatccacaccgaagaattggtacagctcatagctgtaaatacccatagagggcacgcccataccgtggcccatgacggagatgcgcttgcccttgtaggtgccggtgtagcccagcatgttccggacggtgttaaagcacaccacctcctccagatagtggtccgccacgtacttggcccgcagggggtcgccgggcatcagcacagcttttgcaatctggctctcttccgccgcgatagaggcggatggggattccttgatggccatttttgattcctccttgtaatgtagatgtcagatattccatttcgttgtcacttcttgtcgtcaaacagcgccttcaggctcttggtataaggcgggcggcagatgcccttctctgtgacgatgccggcgatcagctcatggtccgtcacatcgaaggcggggttgtagcacttcacctcgggcagagccatgggcttttcgtaccacatggtcttgatctcctcgccgtcccgctcctcgatggggatgtggtccccgtcggggcaggccatatcaatcgtggaggtggggcccagcacgtagacgggaatgccgtagtgcttagccagaatcgccacgccggaggtaccgatcttgttggcggtgtcgccgttggcggccacccggtcgcagcccacgaagcaggcctggacccagccgttcttcatgacaatggaggccatgttgtcgcagatcagcgtcacgtccaccccggcccgctggagctcatagctggtgagccgggcgccctggagcagggggcgggtctcgtcggcgaatacccggatgtgcatccctcgctccgccgccagcaggaaggggccctgggccgtgccgtatcgggaggtggcaaggggcccggcattacagtgtgtcaggacgccgtcgccctccttcagcagactcagaccgtattcggagatggccctgcatttggcgatgtcgtcctcatggatgactactgcccgctcgtacaaagcgtccagcatttggccccgggtatcgtggacatgctccaaggcggtgcgcatcatctcccggatggcccagcccagattcaccgccgtgggacgggccgcgtccagctgctggccatagtcgctgaggcgcttcaaaaacgtgggacggtcctcggtccggatggacttggccagcacatacatgcagtaggcggcgcagatgccgatggccggggccccccgcacccgcagggcccggatggcctccaccatctcgtcaatggtctggaggcggatctccttctcctcccccggcagcagggtctggtcgatgatgtaaagggcctccgccttccggtcgtagcggatgttctgggcatgggttaccgcggtgatatctggcatggtggttcttcctttccaaacggcggccgcccctccggtctcccggggcagcgccttcgtgttctcccgtccagtgtatcgcaatttccccgccgacgcaagggggggaggtcagcagttcccttttcaagctccgttgtgatggcctgaactccgtctttcaccaaccgaccttgtgaaaaatgggtttgtatgataaaataggggtgtttccagtgagcctgtgtatcaggagggattgtatgcgccagccccaaacgatctggtccttatgcgcttttatatttgggttgatgggaatcatttttgttttcctcgggatgctcttttatatcacagacatccctgtgaatggcggctgcaattggtcttttatcccaattggggcgatccttttattgggcagtattgtttgtttggcgaggtgcggtctgcaggagcagcgcagaaagcacctaaaaacaaacggcatttcagtggtcggaaaaattcaatccgttcgacatctagtttggatcaactggaacacaaagacatttgtaaactggcccgggcaatgctctccgtgggtcgttcaatgctcctactgttatggcggacggacttatacagtcaaaagcctcttgtcatggataaagccggctactgattttcagcagcccgttatttatcttgatccacgcaatccagtacatgcctatgtggatatggatacaatcaagtgggaactttcatctttttgagcgcaatcacaagccgatcatatctacaggcctctctgttgatttcaccaaatgaagcgattgcatacgattcgccaagggctaccgcagcaaaacagcagggcggcgggaatgctcccgccgccctgtgtatctgtcacacgcggaggatccagccgtccttccggggcttgggggcgggcaggtccccctccacataccccaggatgcagttgcccacaccacggtaggtctccggcagcccccacttcttcagcagttccttgccctccggccggtcaaaaagctccatggcccggttgatccagcaggagcccagtcccaaagccgcggcagcggtcatcaggtttcccatcaccagggagccgtcctgcagccagttcagcttctctccgtcccccagaaccaccaccacggtgggggcaccgtagaagggatccgtgccgggattgccctggatctccgcgttcagcttggacatccaggcaatggtctccgggtcctggaccaccaccatgacagaggtctggagtcccttggcggaaggcgcccaggtgcccgcctccagaatggcgttcagctcctcgtccctgatctgctccgccttgtacttgcggacgctccggcgctccttcaaaaccttcaatgtctcgttcatgttcgcagcttcctttctatcgttatgttgctttgaaaatcaaatggctccgggttccagcacctgccccataatctcccggcacttttggtacatcaggatggtgtcgcgcaggccaggacgcacaggtccgccgcttccccggcccggaccatctccacagttttctccgggccgtaataggtgtgctccagatccacggtcaagaaccggaacccggcgtagcccgcggcctccacaaactccggtgcagcggactggatgaaggtccccagaaaaggccgcccctccgccagcagagcggaaaatgcaacgtgcatggccgtgcccctttctcatctattatagcacatccccccggaattcccaacgttttttcacatcaggtatcgcccctttgcggattccggaggtgacagctgtcccgtgacgtgctatactgataaaaatattgcgctttggcaggactttttcccaactgttccaaattaaggagtgattttgaccatgccccagcctctttctgaacgcaccgccagtttcaccgattccgtgatccggcggatgacccgcgtctccctgaagtacggcgcggtgaacctgtcccagggcttccccgacttcgagccgccccaggcgatcctggaacggctggcccaggtggcccgggagggcccccatcagtactccgtcacctggggggcccagaacttccgagaggccctggcccgcaagcagtcccgctatatgggccgcaccatcgacccggacaaggaaatcgtggccacctgcggctccaccgaggctatgatgtgcgccatgatgaccgcggccaaccccggggacaaggtcatcgtcttctcccccttctatgagaactatggggcagacaccatcctctccggggcggagcccatctatgtgccactgcacccgcccgccttcaccttcgacgtggacgagctggaggctgccttccgccaacgtcccaaggccctggtgctgtgcaacccctccaacccctgcggccgggtcttcacccgggaggagctgctgaccattgcggagatggccaccagatacgacacctacgtcatcaccgatgaggtgtatgagcacatcgtctacgccccccaccggcacacctacttcgccaccctgccggggatgtggaaccggacgctgtcctgctcctccctgtccaagacctactccatcaccggctggcggctgggatacatcatcgcgccggaggagatcatcgaccgggccaagaaggtccacgactttctgacggtgggctgcgccgcgccgctgcaggaggcggtaatccccggcctggagttcggccaggactactatgacgacctgctggccaagtacacccacaagaaggacctgtttctcaaggggctggatgacctgcacatctcccacaatgacccggagggcgcctactacgtgctgctggacatcagagagtacggctatgagagcgatctgcagttctgcaagaacctggcccgggaggtgggcgtgggggccgtgcccggctccagcttcttccgggagccggtgaaccacctgatccgcctccacttcgccaagaatgacgacaccctcaacgaggccctgaaccggctggagaagatccagaagctgaaaaaataatccccctcgggcccgtccggaaaacccggacgggccctttttcgtctaaagacagaagaggttctcttccctccgccccagtccgcgcatatccctttttctccccgcataggatggagcaacaagaggcggggagtgttgtgttttgaagggtaacatggaggagcgggccgaacggctggctcagtacatcatcgaaaaccggaccacggtccgcgccgccgcacagaaattcggcatcagcaaatccacagtgcacaaggacatctccgaacggctgccccagttcaatcgggtgctgtaccagcaggtgaaggaagtcctggaggtgaacaaggcccagcgacacatccgcggcggcatcgccacccggaaaaagtaccgcggggaataaaatgcgcatagactagtcttagaaagctcgcaacggaggaatcgatatggcaaagcaatcccgctgccgccgcgtggcccggtccacaccggagcccccggtcgccgcagtgccggccaccccggagcctcccgtccgccgctggcctcacccggtggagggcgtggagcccatccaggacctggatccggcactccattacatacgatgcgccctctcctatcagaaccaattgctggctgacatcaagactctcttgcagcagctggttccggaggagacccgggaagatgcggagaattcctgaaaaatggcgtgccgcgctccggcacgccattttcctcttgtgtttttccgcttcccgttttataatgttgcaacgagtattatgtaaatcttctcacccagtttttccaaagaaacccccgcggcaccgccgcggctgtaaggagcgttttgaatatggcaaagagaacccgccggagacggcgcagctggagcagactgctgcttctcgtggtctttgtggccgccgcactgtatgccggctacttctgtctcttccgtcccctgaggtccccgccgaaaccacccggcccgacgaagcggaggaggtctccgccgaagacaccgcccaggacgcagaagtcctggcccaggcggcccatctggagcgcaagccctatttctacaccattctggtgtccggcgtggatgaccacaatggcggcagcgacaccaatatcctggtggccgtggatgcagagaacgactacatctatggtgtcagcatcccccgggacaccaaggccgtcatcaatggaaagaaccacaagatcaacttcgcctataactccggcgggaccgctctgctggccgagaccatctcccagcagctgggcatcccagtggattttacggtaaccgtagatctggacggcttcgccgcgctggtgaatgccatcggcggcgtggactttgaagtccccatcagcatgaattacgacgatccttaccaggacctgcacatccacttctccgccgggatgcagcatctctccggtgcggaggcgctgaaggtggtccgcttccgccacaacaacgacggctccggctacggcagcgaggacatcggccggatgcagacccagcagaacttcctaaaagccgtggctcaacagacgctgacgctctccaacgtggacaaggtgggggagttcgccaagatcttccagcagtatgtggacacggacctgtcccttgggaacctggcctggctggggaaggaggccatcagcatgggcgtggataagatctccttctccactctgcccaacgagtggcgctccccctacatctatctggacccggacgccactctggagctggtcaaccagtacctgaatccctatgtggaggaccggaccatggaggatttggacatcccctcctgaaaaggcccctgtccgcgttttgttccatcaggcagaaatcctgaattcgatcttccattttgtataaggaggtgccgtcatgaagaaacgggtccccgcgctggtgctggcactggcgcttgctcttactgtccccgcctgggccgcccaggacaccccggacaattttgtccgcagcaaaacctacgccggccagttctccgacctgacgccggagtccacgttctacgacaatgtggcggcgctgtatgcgtatggtctctccgtaggcaaggccgacggcactttcggcctgcgagaccagctgaccgttgggcaggtggtgattttcgccggccgcatccgcagtctgtaccgcaccggagacgcggaggcaggtccaggcgcctatgccgccgagaatgaggcagcggccctccggtacctgcgctatctccagtcggagggtgtcatcggcacggagctggacgagtccctctccacccccgccacccgggcccaggtggcccatgtgctggcgaacacgcttccggaggaggccctgccgcccgttcacgcggacctggtaactcaggcttacgccagccggcagttcatcaccgacgtgaccgagtacaccccctattaccaggacatcctgaccctctaccgcaccggcgtgtccgtaggcagcgacgccgctggctccttcctgccggaccagcccatcacccggggcgcggccgccgccatgctgacccgcatggtggatccaagcctgcgggcaacgccggactgggacctgggaaaggagtcctggagcgccctgggcgctgccatgggagatctggtgcccttggggacgtatatcgccgctcccgccactgcggcggagatagatgaaagcgtccgctacatgctggcatccaaccagaacacgctggtcctgcagtaccccagtctctccgtaacctccgcccgacgggtgatggaggcggccctggcagctgtgaaaacctattgtgagcaatgctacaacacggtcaactgcacctattctgcggacgggtccatcaccctcaccttctccgccgccagcgcgggagatcagatcctgacttaccgcgacgcggccatggaggcggccattgccgtccatgatgccctgtgggagagcggagagatcaccacctccatgtccgactatgagaaggcccgggtctacttcacctggatctgcgataactgcgtctatgattacaccgccggggacagctccctgagccatattgcatacagcctgtttgaaaacggcaccgccgtgtgcgacgggtacaccggcgcctacaacctgctgctgaagctggagggcatcgactgcacagccctctccaacaactcccacatctggaccgtggccaccttggacggcacagactaccacatcgacaccacctggggcgacagcggccccgcccccaattacgactacttcgccatgactgccgaagagtcctggcagcaccacagctggtaagctgttgaaaagcgcccccggcttttgccgggggcgcttttttctcttcaggggctgccgactttcaaagatgatggtcccgcagcagccgcttggcctgctcccacagctcgtcgctgacagtctggaccaccacgaccttctgcaccagctccggcagggcagccgtcagctcatgctcgatcagcgtctcgttggtcaggtccgcggaggggcacccggcacactggcccagcagcttgatatacagcacgccgtcctccaggtggtcgatctccagctcacccccgtgggcccggagagacgggcgcaccttctcgtccagcacggcttcgatctgcttccactcttccctcatgtgttttcctcctgttctgccgccttggcggcggcaatctcctcccggatgcggtggcgggtgctgtcaaacagcagctcccggttgtggcggaaataggcgtcacagccaaactgctccacgaaccaggaggtgttgtacccgacggtgatctccgtgacgaagatcaccagctcctggctgttgccgaaggtggtctctaggaaacggaaggcgttgtcgaacatgtccttcgtctccatggccacggccttccgccgctccacctcttcaccgaaccagccccggacggcgtccatagccccttccggggccacggcctcccggtccagccgctggcggtagtcctccagggcgttgatctcccgctgcttgaggtcccgggactccttgtccaactggccggcctctttggcctgcttcatggcagtacgccgcttccacagcagctggtccagcaccgtcagcggcggcgcgtccgcgatcttctcccgaaactctgtcagggaggtgtggagggcgtcggtcagggcgtcctggcagcgggtgttccgggcttcctcgctgagccgggacagcaccagccccatgacggagagcttctcatcaaagggcgcctcccgcagctccagcacggtgatgttctcccaggtgccgctgaggatcccctccacgtggtaggtcttttgatacttgtagaacatctccaggtaattggcgaagtccttggcaatgcggggcatctggatgtactgccccaccacctcccggtccgcccggatgcccagggtctcataagcgtacagcagttcgctgagatcctcccagccccgggcggtggcaaactggaggccgtctgccgtgttctcgatgcggtagaagttgtccttcttgatgtccaggtaggagaggatggccccgtggaggttcttccggcgggcgtactccttccacacgccgtagtcctcctccacgtcgatgcgcttcacccggtccagggtcaccacgtcgaagtcccggacggacttgttgtactccggcgggttgcccgccgccacgatcagccacccctcgggaagggcctggttgccgaaagtcttgcactggaggaactggagcatcatgggggccagggtctcgctgacgcagttgatctcgtccaggaagaggatgccctcctgcagtccggtccgctccatcagccggtaaacggaggagaggatctcgctcatggtgtactcggtgacggagacctcctccccgccataagtccgcttttcgatgaagggcaggccgatggcgctctgtcgggtgtggtgggtgatggtgtaggccaccaggcccacgccggtctcggcggcgatctgctccatgatctgggtcttgcccacgcccggcgggcccatcagcagcaccggccgctggcgcactgtggggatcaggtagttccccagctggtccttggccagatacgccttcaaggtattggtgatctcctgctttgcctgtttgatgttcatatcgttagctccttacagttggggaagttcgtccaaatcgatcaggtccagcccggcggctttggcctcctccgctgcctcccgggcggcctgttccagggccggggtgggcaccaccagccggatggcccaggggggcatctttacggacaggggcggctcctccaacagcacgaaggccgtgtcatagggcggccgcttccggggatagacgcccatgccgtcggtgaagtataccagcccccgaaggaaggtgaaggccccctctacctggagctccgccacgtgttcaaacaccggccggaagtccgtggcgctgccgcccatcagagagaagttctccatataggctttcaattcctccaggtcgcggatgggggtgtcggaccggacctggtcgtcgcactggagaatgcgaatgttcaccttccgagtgaaggtctccgtgctgcggaggatggcgtaagtgcaggccagaaactgccgcaccagctcaccggaggtagacatggaggtgtccacggcgatgacgaagtcctcgatccgcttctcctccttcgtctccggcggctccaccaggggcatgttgccgtagagctggaggccgtaggtgtagaagatatagtcaaaggcgtcgccgtccaccgccatcacctcccggggcacggcgaaccgccggaggaaggtccggtagtccacgtcgtcccggttggccacctggatctgctccagcaccgcctcgccgccggtggccttgccggccagcacggtctccagtcccgtctgggtcttttcggagacgccctgccacttctgctcccgctgcttctgctgctcctggtcctgctggtccgggtcccacaggccatggtcgtccaccagaaaggtccgctggagccgggccacctcgtactccggcaggtccagccgcaggagatggcggtagatgccctccgccgtcagcaccggcatctctgcccggcactcgccgtagaacttctgcttggcggggacgaagcccccggccaggcaggggtagtccagctcgtccaggatgctctccaccgcgacatcgcaggccagatcccacagctccgccaccctgccccgcttcttccacaggtgccgcagcatacagtggagcagcacgtggagataggcccggtccaccgccgtccgggaccggagataccgctccgagaggaagctgccgtcgtagtacagcgtctccccgtcggtggccagggacagcgtcaccccgccgccgggctggaagtccaggctgcacagcgccacatccagatagggcagattcagatacagttcattccgggccgtctgcaaaatctccagtccgatggccgtcaggtccttggccgccatggtgcgcctccttccctgctataagtcaaaagtcttgtccagcccccggggggccacatcccgctgctgttccagcagcagggccagggcctcggagaccccgctctccctcgccagggcgcaggcggcggacagggcctcccggtccggctccgccgtcctcagcagaaacgccagccccggcatgtcccgctctcccaccagccagactgccgcctctccggcgtgggcccggaggtaggacaggtactgcccctccgcccggggcgtcagctccaccgggtagcgcagccgccagaaggccagccgcaccgcgcagtcctcatcgtgctccatgcccagaaaaccgctccacagctcgtcatacgtccgcaggtccagccgcttccggcggaaggagtggtgatagggatatccggcgccgaagatgttgtaatcaaagtgatgggccgggcagttctcctcataaacctcccggtactccggaaagagcaaacggaacacggtgccgtccgtctcctccacggtgacgtccagctcccagggcagttcgtcggcaaaccaggccagggtgtccccctgctcccccacccgggtcagatggaaggctgccagccgtcggcagttcatcagcaccccgccgccccactgaccgatgccgtcgtgaagccgcagggtccgcaggccgccgcagttcatcagggcgtaatcccccacccgctccagggaccggggcagggtcaggtcctccaggtcccggttgctccaggtccccgggtccgtcccggtgccgcaggtcaccagcaggtcctccccctccgcggaagcggcggtgggcgagagggcgtggtcccccagggccgtcaccggcaggccgtataacgtctccggcaggcgggcccgggcgtcgcaggtggccgcccgcaggatggtaatccccgccgcctcccggcgaatggttagcttccagtttccgctgccggggatggtctccacggcgctcacctccttttctccggacaagccgtcagtctcagctttagtagtgtatcacattttctgttgagagcctagccccaaggaccacaaaaatttttgcgggatccagcatttccctcttgacaatccgtgcatactgtatatactgtaaatgtacagtacgaacaggagtgacttccatggaactcatcatccgcaataccaccaaccaacccatctacgatcagatctactcccagatcaaagcccagatcattgccgggaagctctcccccggagaggcgctgccctccatccgggccctggccaaggacctgcggatctccgtcatcaccaccaagcgggcctacgacgagctggaggccgacggcttcctctacaccgtggccggcaagggctgctttgtggcggaaaagaatctggacctgatccgggagcagaagctgaaggagctggaggaccacctggacgccgccgtggagctggccgcccagtgcggcgtctcggcactggagctgatggaaatgctccgcatcctgctgaaagaggaggaacctcacgtatgaacgccattgaattgagccatgtgacgaaacactttcccggctttaccttacaggacctgtccctcaccgtgcccagcggcaccatctgcggtctggtgggagagaatggcgccggcaagtccaccaccatccgcctgctgatgggggccctgcggccggacagcggcacctgcaccgtcctgggggcggattccgccgcgccggagtttctctccctgaaagaggacatcggcgtggtgctggacgaggcctatttcccagagagcctgaacgcccttcaggtgggaggcgtcatggccaagacctaccgccgttgggacggaaaacagtaccagaattacctcacccgcttcggcctgccggagaaaaagcccttcaaggacttctcccgtggcatgaagatgaagctggccatcgccgtggccctgagccacagccccaggctgctggtgctggacgaggccactgccggcctggaccccatcgtccgggacgaggtgctggagatcttcaacgagttcacccgggaggaggaccactccatcctgatctcctcccacattttgagcgacctggagaagctgtgcgactatatcgccttcctccaccaggggcggctgctgttctgcgacgagaaggatcggctgctggaggagtatggcatcttcgtgggcacggcagatcaagtgaacagccttcaggacggggccgtggtagcccgggagaacagcagcttcggcggcgtccggtgcctggtgaagcgggcgctggtgcctgcgggctgggcgctggagcggcccacagtggaggatatcgtcctgtttttggtgaaaggagcgaaggagcaatgagtgccctgcttttgaaagactactacgtgatcttccggcagatgaagatcttcctgctgttaattctggtgttctcctgcatccccggcacgttttacagcacctttgccgtggtgtatgcctctatgctgccctacaccgccctggcctatgacgagcggagccgctgggaccagatggctgccatgatgccgtattccgcccgggacgtggtgctgagcaagtatctcttcggctggatcgccgtggccgtctcggcggcggccacctttgtccttcagaccatcctgtcggtcatctggctcagcgatgtggagggtccctccatccccgtcatcctgctgtccgtgtgcgtggccgtgtgcatcctggacatcaccctgcccatgatgttccggttcggcgtagaaaaggggcggctggcgatgttcctcatcatctttctggtgtgtgccagcgccggaggcatcgccaccattgagcagtcctccctggacggcggcttctatctgtccctctccctggttcccgccgccatcgccgccgtggtgctgaccgtggtgtccatccctctcgccatccggttttacggccgccggagccggtgagcggtatggaggatacaccgaaaacgctctgcccggcgccggccccggcggacctggccgcgttgctggccctgtgcggggcggccctcctgaatcgaaaggagccgaaatgaagaattcgcacacctgtcccaagtgcggcagcagagacatcgtccgaatccccgaccaccccagccgctacgctagcggcagcaacatttacaccacccggtacaccctgctgggcaaggtcccggtgatccgctacgtcagctgcggctgcgggtatgtggagaattgggtggagtcccccatggagctggtccagatccaccagacctacggggctccatgactcttccaaaggccgggcgcggagtttccgcgcccggcctttgccgaaatccacagaaaaccagttggaatcgccctgcggattctgccggttttgccatctgacggccgttgacattttcccaagccggtgctacactgaaacagtattttttggaaacgctttgggcagcggtttgcggcggatgccgcaacgcgacaaccgaacagacacaccgcggaccgcggccgaacgtcccgaaagagactgggactttcagccgcaaaatcggtccggcggtgttttttgttatgcttttgcataacaaaaaacgaaaatgcgccatttccccgcccctttggggcaaccggaaatgatgcgcaaaacttcatgcgcagcggcatttgcctgtattcgtggtgcactgtaccgcgcatgaagtttgttttttgtttgtcggcccggggcgtacaattcggtttcctgctaaaactgtttgcgtggaaaggcaaggtgagcggcatgtcaacgaaattcgtattcgttaccggcggcgtggtctccggcttgggcaaggggatctgcgcggcctccctggggcggcttctgaagcagcggggcgtccgggtgcggaaccagaagttcgacccctatatcaatgtggacccggggactatgagtccctatcagcacggcgaggtgttcgtcaccgaggacggagccgagacggacctggacctgggccactacgagcggttcgtggacgaggacctcaccggcaacagctccgtgtcctccggcaagatctactggtccgtgctgaaccgggagcgccggggcgactacctgggcgccacggtgcagatcatcccccacatcaccgacgagatcaagcgccgcatctacgccatggcggaagaggacgtggacgtggtcatcacggagatcggcggcaccgtgggcgacattgagtcccagcccttcctggaggctatccggcaggtggcggcggagcggccccagggggatgtggtgttcatccacgtgcccctcatcgtccagatccccggcagcggcgagctgaagagcaagcccacccagcactccgtgaaggagcttttgtccctgggcatccagccggatattctggtatgccggtgcgacgtgcccatcacagaggacatccgccggaagattgccctgttctgcaatgtccagccggactgcgtcatccagaacgccacggcggagacgctgtatgaggtgcccctgctgatggccaaggagggtctggacgaggtggtgtgccggaagctgggcctcatcactcaccagccggatctgcgggagtggagcgccatggtgaagcgggagaagaacgcccgcaagcgggtgtccatcgccctggtgggcaagtacacccagctccacgacgcctacctctccgtggtggagtccctgaaccatgcgggcaccgccaacgacgcggtagtagacatccggtgggtggactctgagaccctgacggaggccagtgcggcggagcggctggcgggctgcagcggcatcctggtgcccggcggcttcggcgaccggggcatcgagggcatgatcgcggccgtgcggtacgcccgggaacactgcattccctacttcggcatctgcctggggatgcagatggcggtgatcgagttcgcccgccacgtgctgggctgggcagacgccagctcctccgaattttcctccaccgcccacccggtcatcgacctgatgccggaccaggtgaatgtcaccgccaagggcggcaccatgcggctgggccgctacccctgcgtgctggcagagggctcccgcagccgggagctgtatggcgcggcagagatctccgagcgccaccgccaccgctacgagttcaacaacgatttccgggcggagatgcaggtgggcggtatgcggctggcgggcctgtccccggacggccgcctggtagaaatcatcgagctgccggaccacccctggttcgtgggtgcccagtttcacccggagttcaagagccgtcccgaccggccgcatccgctgttctatgggtttatcaaagcctctgtggagaaaatggaagctgacactcaataagtcccgggcgggacggctatctgccatgtgggcggttgccccgcaaggggcgagcccgccagcatctctcgcggactgccgctgcggccgtccgtcccgaccggccgcatccgctgttctacggatttgtaaaggcctctgtgaagaaaatagaggctcaggaggtaacacgatgaatcattttgctaaaatcgccgcccagctggaatcccgtgacctggacggtatgctgctgacccatgaggccaaccgtttttacgcctccggcttccactccgccggaaccgacggcatggccctggtcacccgagagaagttctattacttcaccgactcccggtacacagaggccgcccggcggcatgtgcaggatgcggaggtccaggaggcaggccacggccggggctattccgccctgctgatggaggccgtccagcgccacagcatccagcgcctggggtttgaggacgcctatatgaccgtccgggagcacgacgcctatgcccgggctctgccctgtgagctggtgcccgcggcggacctgctggcagaactgcgggcggtaaaggacccggaggagctggagatcatgattgccgcccagcggattgcggagaaggccctgacggatatcctgaacgagatccggcccggcgtcacggagaaggagatcgccgcccggctccagtatctcatgctccactacggggcggaggacaagtccttcgatcccatcgtggtgtccggccccaacggaagcctgccccacggggtaccctcggaaaaggtcatccaggccggggagttcgtcaccatggacttcggctgcatctatcacggctactgctccgacatgacccgtaccgtggcggtgggatccgtgacggatgagatgcgccaggtctacgacacggtgctgcaggcccaactggcgggtatcgcagccgcccgggccggggccactggaaaggccgtggacggcgccgcccgggacatcatccggcaggcgggctacggtccctgtttcggccacagcttcggccacagcgtgggagtggagatccacgaggggcccaacgccactccctccaacgacaagcccctgcccgccggggcggtgatctctgccgagccgggcatctacctgcccgggaagctgggtgtgcggattgaggacgtgctgtacctcacaccggagggctgtcaaaacctcactctggcccccaaggagctggtcattctctgaccccgattcaatcccacgcaaggaggaaaaatcccatggcaagctatatcggcgcgtccgccgagcaggaggacgccgaccccattctcatggcctttgccgctgaggcgaccaagggcgaccccgccagtccggaggcccgggagctggtgctccgctggcaggcccatctggtgaagttcagccgcagctgcgacgaggagaagctccgccgcctggcggacctgtacagctgggacaaccgctttgcagaggttctggacagctacggccccggcacagcccacttcatgggcgaggccatcgaggcctatttggaaaccctgtgaacgccgtcgcgcaccggcgcaaaaccgcctccgcccccgctggcggaggcagtttttgcccttccggcccccggttttccggcctgcgggctgttgacaaacctgcgccggagacgcataataaagctatcaacacgccaaaaattggatgccccgcatccacttgagagggagtattcatggacaccatctatatcaccggacaccggaacccggacacggactccatcgtctccgccatggcctacgcggcgctgaagaacgcccttggccagcggcagtacgaggccgcccgcctgggccagatcagtgacgagacccagaccgtgctggatcgcttcggcttccagccccccaagctgctgaacaacgtgcgtacccaggtccgggacctggattacgacacgcccgccaccctgtccgccgctgccaccatcagccgggcctggcggaccatgcagaaggacaagatctccgccatccccgtggccaatgaggacgggaccctgttcggaatgctctccgccggggatgtggccaactatgacatgtcctccgtccgcaaccctaaggtgggcgagatcccggtgtacaacctgctgtccgtgctggagggcaaaattctcaaccagggcggcgagatgcgggacgtgatctccggtgaggtcaccatcgccctgcccgccagccgggagaacctggtgttctccgacccgggcagcatcgtggtctgcggcgaccagccagacatgatccgccgtgcgctggagatcggcgtcagctgcatcatcgtctgtcaggcggaggtggacccggagctgctggccatgcagacggacacctgcatcatctccaccgcctatgacgcctaccgggcagtgcggctcatctaccatgccatgcccatcagcagcatctgcaagaacaaggatctggtgtgcttccacctggacgactatatcgacgacgtgcagaacaccgtgctggaaagccgcttccgggcctatcccattctggatgaggaggagcgggtggtgggcaccctgtcccgctaccatctgctgcggccccgccgcaagcaggtgatcctgatggaccacaacgagaaggcccagtccgtaccgggcctggaccaggcggagattctggagatcatcgaccaccaccggctggcggacatccagaccaagaatcccatcactgtccggaacgagcccgtgggcagcaccaccaccatcgtggcggggatgtatcaggacaagggcctgatgcccaccgccaagatggcgggattgatggccgcggccatcgtctctgatacggtcatgttcaagtctcccacctgcacccagcgggacatcgacgtggccaaccgcatggcccggatcgccaacatctccctccaggcgctgggacaggtgatcttctccgcctccggcggcggtgcgaagtctgcagaggagatcttccgcacagactacaaggagttccacatcgcaggccacaacctggcggtgagccaggtcacctgcatggactccgaccagctgctccagcgcaagggagagtttttgcagctcatgagctccctgcagaagaagcagggcttcgacatggtaatcctgatgattaccgatgtactgctggagggcacccagctgctgttcgtgggcgacagggacagcatccgccaggccttcaatgtggaggatgcggaggacgtggtgttcctgcccaaggtcatgtcccggaaaaagcaggtcattcccatgctctccgccctgtggggctgaggagcgcgtggccccgccgcccggcgctttctgctgaggaagctgccgggcggctctgttttttgggaaatctcctgcctctgaaacattttccagagattttgtataaattcaccattgactttgcctgtttaaagcagtatggtgtaaaagtacaaaggccggtcggcagaagggagctcttccatggttttgtttgcagcagcgttccgcactgtggcggggttctctcgattttatggctgccaggtccgctatgcgggccgatattgtcataggcagagcagccagtgaaggtccggcggccggtggatctcaccccgtatggaaggcggctctgctcttcggacagagccgctttttgtaatttccccgcgatcaatcttgaaaaggagatctctgcgatgaaaaagaagtttcttgcccttgcgctgaccgccgtcatggctctgagcctggctgcctgcggcggcgacacccagtccacagataccgatgccgataccagcggcgacgagtccgcctccggcagccagacctacaccgtgggtattatccagcaggtccagcacgaggccctggacgccgccacccagggctttcaggacgccctgacggaactgctgggcgacagtgtcaccatcgacccccagaacgcctccggcgataccgccaactgcaccaccattgccaacaactttgtctcccagggcgtggacctgatcatggccaacggcaccaccgctctccaggccgctgccaccggcaccagcaccattcccattctgggcacctccatcaccgagtacggcgtggctctgggcattgacggctttaccggcaccactggctacaacgtctccggcacctccgatctggcgcccctggaccagcaggctgagatgctgcacacctggttccccgacgcccagactgtgggcctgctgtactgctccgccgagcccaacagccagtatcaggtggacaccgtccaaggctacctggaggatctgggctatacctgcacccaatactccttctccgactccaacgacctgtccgctgtggcctcctcagcctgcacggccagcgatgtcctgtacgttcccaccgacaacaccgctgccaacaacgccgaactgatcggcaacatctccctggacaccggcactcccatcatcgccggtgaggagggcatctgcaagggctgcggcgtggccacgctgaccatcagctactatgacatcggctacaaaaccggtgagatggcctatgatatcctggtgaacggcgccgatcccgccaccatgcccatcgagtacgccccccagttcacccccaagtacaaccccaccatgtgcgaggctctgggcctgaccccgcccgacggctatgaggccatcgccgaataaggacgaatggacggagaaccgataaagagccggcggatgttttcaaattcttgtctgcaaaacttccgccttcaccggcggggagccctctccggggctctccgccgcccggtctccgtcctatgggcggcgtctgcggtatgccacccttccgccccgtcatccaaatcttatcaacacactttcagcggaaaaggggcttcccctttccgctgaactttgctagaatagagcagcaaattgcctccggaaacagccgggggattttggagggatttcacttgaacatcatgcatctggtcaacgccctgccgggtgtggccgcccagggactgatctggggcatcatggccatcggcgtctacatcacgttccggatcctggacgtggccgacctgacggtggacggcaccatggctaccggcggcgccgccttcatcatgctgaccatggcgggggcgccggtgccgctggcgatgctgggggcgtttctggcgggtgtgctggcgggactggtcaccggcctgttccacaccgcctgcggcattccggcaatcctcgccggtatcctcacccagctggccctgtactccgtcaacctgcggatcatgggacaggccaaccggcccgtcagctcccgacagtatgacctgctggtggaccagcagagcgtccgctccctgagcctggacaaccccatcctggtggtagccatttttgtggcggcggtcattgccctgctgtactggttcttcggcacggagctgggtgcctccctgcgggctactggttccaaccccaatatgtcccgggcccagggcatcaacaccaacttcaccaaggtgctgggcctgatgctgtccaacggactggtggccctgtcctccgccctgctggcccagtaccagggtttcgcggacgtgaacatgggccggggcgccatcgtcatcggccttgccgccgtcatcatcggcgaggtgatcttcggcaaagtgttccgcaactttgcgctgaagatgctggctgtggccatcggcgccattttgtactacctggtgtaccaggtggtcatctggctgggcctgaacaccgatgacatgaagctcatcaccgccctgatcgtggcggcctttctggccatcccctactggaaggggaaatacgcccacgtcaaggtgcccgccgggagcgccaatgccggagcaaaaacaggaggggatcaggatgcttgagatcaaggagatctggaagacgttcaacgccgggacggtcaatgaaaagcaggccctccggggcgtcagcctgacgctgaaggacggtgacttctgcacggtcatcggcggcaatggcgccggcaagtccaccatgctcaatgcggtggccggcaccttttctgtggacagcggcgccatcgtcatcgacggggtggacgtgacccgcctgccggagcacaagcgggccaaattcatcggtcgggtgtttcaggaccctatgatgggcaccgcccccaccatgcagatcgaggaaaatctggcgctggcggcccgccggggccagccccgcggcctgggctggggcatcaccaagacggagcgggcggactaccgggagctgctgcgggacctggggctgggtctggaggaccgtctgaccagcaaggtggggctcctctccggcggccagcgccaggcgctgacgcttctgatggcctctttgaagcggcccaagcttttgctgctggacgagcacactgccgccctggaccccaagaccgccgccaaggttctggctctctccgaccggatcgtggaggaaaacggcctcaccaccatgatggtcactcacaacatgaaggacgccatcgtccacggcaaccggctcatcatgatgtacgacggccgtattgtcatcgacgtgtccggcgaggagaagaagaagctcaccgttcccgacctgctggccctgttcagcaaagtcagcggctctgacgaagccgacgacaagctgctgctttcctgagccgcggaaaacccgattcaaactgcatgttactccccggcagggccatcctgccggggtagttcttgccccggattttatctctttaaagcagcaaaaaagatttgtgcaaaatcacggttgacatttccgccgccgcttcgtataatgcaaagcaatcaagcaaaaccgatgagcaagaggagtacctggtcaggtcacctttcagagagccgtggatggtgggatcacggcagagaactttccagcgaatggacttgcgagggcagcgcaaacggcaaaatgctcagtagcgtctgacggggcccgcacccgttatccgggcggcgcgtatgaatgtacgtggaacgagcgggcgctttgcgtcaacttgggtggtaccgcaggatggtttcaagtcttgtcccaaatatggggcagggctttttttgattcccctgatcggtccgggaaaggagtatggagatatgaaacacaataccagacgatggcgcggcctgtgctgcaatatcaattccctgaacggacccctttcaaatattctgtatcaaagattggagaatctattatgatgaatctgctgaagaagctggccgcctgcggcctgtccctgaccatgatcctgtccctggccgcctgcggcggcaccgatgacacctcctccggcgaaagcggcggtgagcccgtcaagtatctgatcggcatcagccagtacggccagcacggctccctggacaactgccgggagggtttcctccagggcctggagcaggccggtctggtggagggcacggactttgaggtggactaccagaacgccaacttcgacgacaaccaggctacccaaatcggccagatgttttccgccgaggacgcggacctgatggtgggcatcgccaccaactccgccatcgcctgcttcaatgccgcggaggacaaggacatccccgtgatcttcaccgccatcaccgacccggtgggcgcccacctggacgcgggcaacatcaccggcacttccgatgccctgccggtggagggccagctccagctgatccgggccctgcagccggatgccgacaccatcggcatcgtctacaccaccagcgaggccaactccgtctactccatcagcgtctatgaggagctggcaacggactacggcttcaccattgacgcggtgggcgtcacctcccaggcagaggtcacccaggcggtggataccttgctgtcccatggggtggactgcctgtccaacctgacggacaacaatgtggtgggcgtgctgggcgccattctggagaagacggacgaggcgggtatccctgtctacggttccgaggtggagcaggtaaagctgggctgcgtgggcggcgcgggcctggactacatccagctgggcatccagaccggcctgatggccgccaaagtcctcaccggcgaggccgcctgtgaagacctgccctacgagaccatcgaaaactatggcctgtatatcaactccgacgcggcggccgagctgggcatcaccattcccgacgacatcgcccaggaggcccaggagtgcgcggaataacatctgtaacatccattaccaaggagaactcttcatgaagcttgtcacctatcgtctcagcggcgccgagcatgtgggcgccctcaccgccgatggaaagggcgtgctgcccctccccgccgccgatatgaacaccttgatcgaaaccatgacccttgccgaccttcgctctgccgccgcggcggcagagcggggcggtgcggtcccgctgtcagatgtggagctgctggctcccatcccccgcccccggcaggatgtggtctgcctgggcatgaactaccgggaccacgcggaggaatccgcccggtacagcgccgatgccttcaccaagaacagtacagcggcggtctacttctccaagcgggtcagcgaggccgggaagcccgacggcgtcatcccccgtcacgcgggccttacggaccggctggactatgaggcggagctggcggtggtgctgggcaaagccgcccgggacgtgaaagccgtcgatgcggcagactgcatcttcggctacaccgtcctcaacgacgtatccgcccgggacctgcagacgggccataagcagtggtatttcggcaagagtctggacggcttcacgcccatgggccccgtactggtcaccgccgacgagatcgcctatcccccggcgctggagatcaccagccgggtcaacggcgagctgcggcagaagtccaataccgctctgctgattacctccatcgggcagatcctggaggagctgaccgggggaatgacgctgctgccgggcaccatcatcgccaccggcaccccggcgggagtgggcatgggcttcgatccgcccagattcctccagtccggcgacacggtggaatgcgccatcgagggcatcggcaccctctgcagcaccgtgatctgatcttttcacaaggaggcttctcatctcatggatgtgatggaactgctgaccagcactctgatccaggggctgatctacgccctgatctcctacggcgtgtatatcacctattccattctggactttccggatctgggggtggatggcacgtttcccctgggggccgctgtcacggcggtgctgatgaccaagggcgtcgatccctggctgaccctgcccgcctccctgatagtgggcggtctggcgggacttttcaccggtctggtccacgtgaagctgaaggtgcggaacctgctggcgggcatcatcaccatgaccgccctgttctctgtgaacctgcagatcgccgggtccaacctgaccatcgaccggggtacggacaccattttcacctctgccccggtgatggccctgtttggggatctctccctctccgggcggaagctgattgtgtccctggcgctggtcatcgtcatcaagctgctgctggacgcctatttccacacgaagtccggcctgctgctgcgggctgtgggcgacaacgccaccctggtgaccaccttggccaaggaccgaggcacagtaaagatcctggggctggtgatctccaacgccctggtggccttcggcggctgcatcgtctgccacgaaacccgcagcttctccgccaccatgggtaccggccagctggtgtacggcctggcggcggtgattatcggtgtgtccatcatacacttctacaccggcacccggctggcccggggactgcggaagtccgggcccctccgcttcctgggttccccccagggcaccacggcggtagtgctgggcagtgtgctctacaagctgtgcatccaggtagccatgagcctgggactgcccaccaatatgatgaagctgattacggctgcactgttcctgctggtgctggtgctgtccggccggaagggggaggcgatcatccatgcttgaagtacgggacatcacgaagatctacaaccccggcaccctgacggagcagcggctgttcgagcacttctccctgacagtggaggagggccagttcgtggccatcgtgggcagcaatggcagcggcaagacctccctgctgaacatcatctgcggctctatccccatcgagggcggtgacgtgttggtgggcagccggagcatctccaagctgaaggactaccagcggtacgccaccatgggccgggtctaccaggaccccgccgccggcacctgccccaacctcaccatgctggaaaatctgtccctggcggataacaagggcgggtcctacggcctgggccggggcgtcaataaaaagcgtatcgacttctatcgccagcagctggcctccctgggcctgggactggaggataagctggatgtgcggatgggggctctctccggcggccagcggcaggcggtggcgctgctgatggccaccatgacgcccctgaaattcctgattctggacgagcacacggcggccctggaccccaagaccgctgaggtcatcatggccctgacggacagagtcatccgtgaaaagcatttgacggccatgatggtcacccataacctccgctacgcggtggagtatggagaccggatcctgatgatgaaccggggccgggtggtgctggaccgggccggagcggaaaagcgggccacctctatggacgatatcctgaccatgttcaatcagatctctctggagaccgggaattgagggaaaagaaagcgggcatcctttggatgcccgcctttttactccttttccagctcatagcccatggccgtcagctcccgtcggatctgctccacatgggcggcgtcccgggtctccagcaccatggagaccatgcaggctcccacgtcggaatgctgatcctcccgggcatggttgatgctgaggatgttggcgccgctgtccgccaccaccttcaaaagctgcagcaggctgccgggcttatccgccaccttcgtgctgatctctgcgatccgcccggccttggacaggcccttggtgatgatccgggacagcgtggtcacgtccacattgccgccggagaccacgcacacggttttcttctccgacgtgtccaccttgccaaacatcaccgccgccaccggcacggcgccggcgccctccgccacggtcttctgcccctccatcagcgccaggatggcggaggcgatctcgtcctcgctgacagtgaccacctcatccacatactgctggcacagggcaaaggtcagatcacctggcttcttcaccgcgatgccgtccgcaatggtggacacgctccgcagctccgtggggcccccggcgtggcgggacaggtacatggacgccgcgcccgccgcctggacgcccacgatccggcagtccggcttcagctgcttcaccgcaaaggcgatgccgccgatgaggccgccgcccccgatgggcaccacgatctgctccacgtccggcagctgctccaggatctccaggccgatggtgccctggccggcgatcaccagcgggtcgttgaaagggtgggcgaaggtgtagccctgctccttcgtcagccgctccgcctccgccgccgcgtcgtcatagacgccgggcaccagcaccacctctgcgccgtagccacgggtggcctccaccttgctgatgggcgccccggcgggcatgcagatcaccgccttgatccccagccgggatgcggacagggcaatgccctgggcgtggttccccgcagagcaggcgatgacgccccgggccgcctcctccggcgtcaggctgcggatcttgttgtaggcgccccggagcttgaaggccccggtcagctgcaggttttccgccttgatgtacacgttctccccaaatttcggggccctgtccagcggtgtccgccgggcgatgccccgcagggcctcctgggcctcccggaccatatccaaagtcagcatggactcccctcccacgtctttcttatgcttcattatatcggcgtgcccggcagaatacaatgcacaactcctccaatgtttttcattcaatgacatcgtttttacagtttgtctttatacaaaggatatccatattctctccgcgggcagcaaggcgttcctccgcctgctgcggcacggaaagttttcaattcatctctatacaaatcttccgaaaattgctataatgaatcaaattttgtcgaaggaggagtgtccgtgaaaccgcaccggaaagcggcccccgcggaggccgcggccgctggccgccaggagatgccccgctgtgcccccaaggcggacagcggcctctcctccgcccaggctcaggccctggcggaggccggctgggacaaccgcccggtggagtctcccaccaaaagcgataagcagatcatccgggagaatatcttcacctacttcaacctgattttcgtggttctggcggtgtgcctgctgctggtaggggactggaaggacatgaccttcctcctcatcgtggcagccaatgccgtcatcggcatcgtccagcagctgcgctccaaacgcaccattgagaagctgtccctcctctccgccgcgaaggtgcggatcattcgggacggaaaggtccgggagctgccggtggaccagctggtgcgggaggacgtagtagagctcaccgccggctgccagatccctgcggacggaccggtcctcaccgggcaggtgcaggtgaacgaggccctcatcaccggcgaggcggacgccgtcaccaaggagcctggggaccagctgctgtccggcagcttcgtcatctccggcaagtgccgggcccggatggaccaggtgggagcagactcctacgcctccaagctgacgctggcggccaagaaagatgacggccccggcaaaagcgagatgatgcgctccctggacagcctgatccgcttcatcggcatcgtgttgattcccatcggcgcagcgttgttctacaaccagttcatcaatcaggatctgggcctgcagcagtccgtggtcagcacggtggcggccctgatcggcatgatcccggaggggctgttcctgctgacttccgtggccctggcggtcagcgtggtgcggctggcccagaatcggacgctgatccacgagatgaacgccatcgagaccctggcccgggtggacgtgctgtgcgtggacaagaccggcaccgtcaccagtcctcaaatgcaggtgcgggaggtggtgcccctggacccggagtcctgttccgacacggacatcaccgacattctgggtgccttttaccgggtgctggatccggataacgacacggcgaaggccatcgcggacaagtttccccgggggcccggctggccggaccggggagccgtgcccttcacctccgccaccaagtggagcgccgtgaatttcctggaccggggggcttatgtggtgggcgcaccggagtatatcctggggcaggacttcgccgccctggaaaagcgtactgccccctacgccgcccagggctgccgggtactgctgctggcccagtgcgacggggcggagatcgggcgcctccacggcgtggtgatccccctggccctgctggtgctggagaatcccatccgccccaacgctcccaaagtcttcgattacttccacacccagggcgtggatgtgaaggtcatctccggcgacaacccggtgaccgtctccgctgtggcggcccaggcaggcatccggaacgcagagcagtgggtggacgcccgggagctccagacggatcaagacatcgccgcggccgtgcgggagtacactgtgtttggccgagtggtccccaaccagaagcggaagatcgtccgggccctccagagccagggccacacggtggccatgaccggcgacggtgtgaatgacgtgctggcattgaaggacgccgactgcggcgtggccatggcctccggcgcggatgccgcctgccaggtggcccagctggtgctgctggacagtgactttgccgccatgcccaaggtggtggcggagggccgccgggtcatcaacaatatccagcgggcctcggcattgtacctggtgaagaacattctgtccttctttctggccctcatcaccctgttcgccgccttcccctatccctttgttcccatccagctgacgctgatctccgccctgaccatcggcgtgccctccttcttcctggcgctggagcccaaccacgacctggtgaagggcaagttcctccacaatgtgctgcggcgggcttttcccggcggtctcacagccatcttcgtcatcctctttgcggagctgttcgtctacaccttcgacctgacgctggcagagctctccaccatctgcgtgatcctgatggcggtaaacggtctcatggtgatctactacgctgcccgacccctggatgccaagcggctggtgctgctggtggccatgagtgcggccatgttcgtggcggtggtgttctatggggcgttcttctctctctcctccctgtcctttgcagcctggctggtgctgatcgtgctggtgctgctggtggtgcccatccagatgggcctggagtggtgctttgaccgctgcaccacggccctggaccgccgccgggagcggctggcaaagcgccgccgcgctccccgcagaccccggccggcgcaccgctcccggcgccgtcggtgatctttcccacgccaaatagagcggaccgtggaaaaccacggtccgctttcttcattgggtcagcaggcggagcatctcctccgccgggtccaccagcggcagccttgtccgggccgccagggcctccttaaaataggggaagtgcgtgcagcccagcaccagcgcctccatcccgccgtcggcaaaccacgctgccagcgccgccagacggtagcgttccaccagctcctccggcggcatccccgcctccacggccagcaccaccggcagcgcacaggcccccagcagatccagggcgggattggcctccagcaataccttctcgatgccggagagtccctgggcgttggcggcgatgactcccagcgcccggtagcggagcgccagccgccggtacacgtccagcggcgtcacgatccgcatccccgtctcctccgcaagccccgggaaatccactgccgcagacagggagttgcagtagacgaaagcccgccgacagccctgggccatggcgcccctcagcaccgccagggcctggcggcgcttgtccgctgccggggcgtgctgaaaggcagtctgctccctgggtccccgggagaggggaaacggcacgcccggcagcccccgttcctccagatatgccacgcccatccgggtgtccaccggtgtgccggccaatacagcaatgggtccgttcatggcgatcctcctctcctcatcccagcttccgcggaaagttgccgaatacccggacgccctcctgcacagtcaaaaacgcgtgggggtccacagagtgcaccatgtggagcagctcctcgatctcatatttggagaggcacacgcacaacacacggacatcgtccttggtgtaggcgcccacgccgtcccagtaggtcacgctccgccccagctgtttgataatgaagtccgccaggacgctctcgtcctcccgcgtgaaaatcagagcctgaacggtaacattctgctggtgcatcctgtccaggatcatggagtttgcgaagttgtaaatcacggagtaaatggcgacctccgggtcaaacaggatcaggatggccgtataaagcagggcattgaagcccagcgcaaatttacccaccgtaaaagcactgtcccgcttgctcatgatgagtcccagcacgtccagtccgccgccgctgccgccgcaggtgaggacgattccgctgccgatcccggtgaggatgccgcccagcaggcaggccgtcagataatcgtccacaatgggctgcgtgggaatgggaatgatgctgtaaaaaacagagtaggataccgtacagatgatggtccgcaccgccagtcccctgcccaggttccgatacccgatcatgagcagcgggatgttcagcagaaaatagaggacgcctgcgatgtcgtaggccccgaagctcacgcccaggaagtcctgcagcagcgttcgcaccagttggcagaagcccagcaggccgccggtgtacaggctcagggggacaatgaagagattcagcgccgcggccgcgatcagctcgcccagcacggcgagcaccagccgcaggattcggttgtgcagggtagtgtacagcatgggtaaaacctcccttgggagtgcagctcccttctgcggatatccatggtccctctttgataccgattatacggtgtatcccgcaaaacctcaagagggaaaattacagggcgtaccgcaggcagcggtacagccgctgtttagcccgcttcaccgtgcgggagacggtggagcggttcacccccagcttttgagcaatctgggacattttcagtccccggtcgtaatagaggaacaccatctcccgctgccggggcgtcagctcctgctcccgggcccggcgcaggccgcgccgcagccgctccagctgctcactgttatcctccgcatggtcccgcagccagacggtcatgtccccgatccactcgctgctgcgggcgtcaaagcgtgtatctctcatgtctgtgatagctcctgtcgtaataatgggccgtcagcgccgccagctcccgggtctcctgcagcagcggcgtcagctctgtgatccgccgccgcagaaggcggcggtcctcctcgtccttcagctcccgcgccgcctgccgcagctcgccgatccgccgccgcagggcggccgcgctctccgcgtagagggcggacatctccagcagcgtcatggcgccgcctcccttccccgcacctggcggaagggagccagctccgcccgggcgaacaccgggaggcaggccccacatacgctgctgccgttgcagtaccagtagtcctctccctctgtgatctccagcccgcagagcgagcagcgcagcgtccgccgtcggcgggtatgttcctttgtttccaaatgcgatgctcctttcctgtatacagatcccggcaagtctcatgtgccccgccggcaaaatgaaaaaaacgggtggaaaagcaaaaattttctgttgacaaacaggcgcttatctggtaagataaattctgctgttggaactgctggtgtagctcagctggtagagcagctgatttgtaatcagcaggtcgggggttcgaatccgtccaccagctccagttttaatatgggggaattccagagcggtcaaatggggcagactgtaaatctgttgccttcggcttcggtggttcgaatccaccttcccccaccaaaaaggtgcctgcaatcgcgggcgcttttttcattttgataaacaagatacttgtaaatttttatttattttacaagtatcttgtttacagctatacagtagcacaagtttttttgaaagtcaagtataattttacaagtttcttgtaaaattggattgacagcttccttgaaatccgataggatactgtcaagaacatcggaaaggatgggatccatggcatttggagaccggatcaaagcccgtcgggaggagctggctctctcccgcccccagctggcggatcggctgggcgtcacaccgtccactgtcagcaactacgagaccggtgtcagcttccctaaggaggagatgatgctccggctgttcgactgtctggagacggaccccaacaccttgtttcaggacagctttcgccgcggcgcggacgtcctgactgagcgggagcggcagctgctggagcagtatcgctccctctctcccctggggcgggagagcgtccagacgatggtggaggcgctgcgggcctgtcagcaggaatccgcagccccggagcaggagccccgggtcattcccctgtaccggacccctgcggcggccggttatgcggcgccagtgttcggcgaggatttcgactacctccaggtcacagacggcgtgcctcaggccgcagagtttgctgtgcgtatccagggggactccatggtcccctacatcccggacggctccgtggtctatgtgaatcgcgatcccctgaaggccggggacgtggggatcttctgcgtggacggggatatcttctgcaagcagtattacaaggatcccgccggaacggtgtatcttttctccctaaaccgggcgcgggccgatgcggacgtggtactcaccgccggcagcggccggacgctcgcctgcttcggccgggtgatcctccacgcgctgccgctgccggggcggacgtaacggagagccgggcgccgcctatgcggcgcccggctctcttgttcggcagtcttcaaacgatgaacccgccgtcggcggcgaggatttgccccgtgaggaaggatgccttgtcggaggccagaaaggcaacggcgtgggccacgtcctccggcgtccccagccgtcccagaggcgtctgctccgccagatcccgcagggtctcctgtcccagaacctgaaccatgtcggtgttgatgacgccgggagccacgcagttgacccggatgtgggagggcgccagctccagcgccagggaccgggtcagccccacgagagcggctttggtgcaggcatacgccacctcgcaggaggctccccgcagtccccagatggatgagatgttgacgatgcagcccgccttctcatggagcatgtggggcagtactgcctggatggtgttccgggcgccgcccaggttcacgcccagatagcgattccactgggcatctgtgatatcctgaaattggatctgccccgcaatgccggcgttgttcaccagcaggctcacgggtcccagctccgcttccgcagtgcgaaccatcgtctccacagccgcccggtccgccacatccgcctgaactgcaatggcatttccaccatggttccggattttttctgccagcgtctccgcctcctgccggtgcgtcaggtaattgatacagacagcatgtcccgcctccgccagctctgccgcaatcgctctcccgatcccccgggaagccccagtgaccaatgccacacgattcatagtgatcctcctgtcatagtgctgtcagcagtataacaaaaaaaacaggatcgcgcaagaaaagtgttgacaaaaggtgcgttttcgtgtatcctatatacgttccgttttggacgattagctcagctggctagagcacctgcttgacgtgcagggggtcacaggttcgagtcctgtatcgtccaccacaaaaagcaccgttttctgatgaaaacggtgctttttcgtaactttttatgcaatttactcgagagttatgtaaccttgctgcgcccctgaccacacggccagccacagtcagaaaaaatttaggcctccaagggcgattcgccctcggggacccgtttgttcaacctgtcagtcctgcctgcttccgccgctctttcttagaggcgatttctgctttcatctcccggatcatatgggccagcttctcttcgcactccgcctctgtatgggcgtagacgttgcgtgccattcgtttcccgttgattttcggggagtagcggccctcccagaggtgttcgctgatttgactgacacaacccgttcccggcttccggtatttcctcttcaccggctggaagtccgtttttgcgacttttggcttagccggggaggatgcccgacgcggtggttcgatcccggcgatcccccgatcgatgctggcggcggcattctcccgcatggtgtcggtgacatgggcatagacgttcagtgtggtggcggacgtcacatggccgatgatggtggacagcgtcttgatgtccatgccatgttccagcgcgttggtggcgaaggtatgccgcaagtcgtgaaagcggatgtgcttgcagtccgcccgattcagaaccttggccagcttcttccggacggcggccgggtccagtggggagtcctcctttttcggagaagggaacatccacctggaacggatgctctgccggtagtctcgcaggacacccagaatgggggctggcaggatgatgctccgacaagagctctttgtcttaggggcggagatcaccagttccctgcgtacccgctggacctgccgttcgatccgcagtactcctgtgcagagatccaagtcatcccattggagggccaggatctcgccccggcgcagaccagtagagagttctaatagcagaagctcatagcagtcgttctcacgggcctgtatcagcagacgccgaatctcctccggagacaatacctgcatctccttcggacggagcgtcggcgtcttacaggcatcggcgggatttttcaggatgaggccctgttttaccgcctgatccagcgccgcccggcaggtcacatggcagcacttcaccatacggtcagagagtccggagccatattgctccacagcctggaggcggccaccctgcttgagttggcggtagaactgttgaaggtctgctgcggtaagcctgttcagcgggatttggccgatttccgggatgatgtgccggtagatgcggttctcgtagtccgtttgtgtctttgctccaatcgtaggcttgcattggttctggtaccagtgatccagccatgctccaaaacacatatcggatgacagtcgttccagctctactttcttcaggctgtctttcaggactttcagcttttgtaggcactctttcttgttttttgccagcacattctttgtcttgggatagccgttgtcatcatagccaatgactacccggccctcccagcggccgtcttttctcagatggacgctcccgtcccctcgttttctgcgttttgccaaggtttcatctcctctcccaggatttctgtcataaaatctccgacgatttcggcggcggtgcgctgcatatctccagtgacatgggtgtaggtatccagcgtgaaggatgcctttgtatggcccagaatgccggacaacgtcttggcgtccacgccggaggccagggcatgggtggcgaaggtatgccgcaagtcgtggaaccgaatgttgggcaggccagcggagtccagcaaggccttcaggtggccgtatgcggagcggggattggtaggggattcgggcttcagcggattcgggaagatccactctgaccaggaatgctttttgcgttccgacagaagctgggcagtacttgccggcagcaggatatttcgggtccctcgcccggtcttggtggcaccggccaccagcctgccgcctttctccgtgtggatggtccgccttactgccagtgttccggctgcttcatcgaagtccgcccacatgagtccgcagagctcaccccgccgcagaccggtggtcagctctgtgtagaagaagtcgtgccagacggcgtcgtgtttgattgcctccatgaactgttccagctggtcatcattcaggatctgcttgggtttgggatttgctttaggaaccgggatattctcggtgggatttttggcaatgatatgggattccttcgccgctttcatggcttcgtggaacatggtgtggatgctgtgtaccatactgccggatagctggtgaccgtattgagcgtgttccttgacacgcccccgtgctttcagaacttcgtacatcttctgtacatccgtcggggtgatttttgaaatctgcttatctccgaggtatggcttgatatagagatccgcgtacctgcggtatccgttcagtgtgctgggccggatggttccggccatgatcgcatccagccagtagtccatccattcgttcagggtgagcttgctgtcctcggtcaggtcaacgccctggtaggcgatgatctcctggcggagctttgcggtcaactctttttgcgtgggtgcgtagatgtagcggaagatgctgtcgccgttttccttatggccgatcacgatgcggccctcccaacggccatcgtcctttttgcgcaccatgccgtcaccggacggcctgcgtttactcatttgaatcgcctcctctgtaggaactcttctttgtttacaccatcgcagtttttgacggtattgttagctgctttttctctgtgaaaacttttcgcaggcctgactcgtcttctgcctcaaacctgtggtaaagggctttcatgtagtcatgcatggtgtgccacctcctgtcaacgacacacaataccgcaaccactgctgaatagccatcccaaatgacaacaattatcagaaaattatcaagttcagagtgaactgcaatgggccgcatccaatttcggatgcggcccatctgaactcctcttatgcatagggattatgcgctgtcggattgcctacgaacatgtaacagaaggctctaccgttatcgatggtaacgccgacgccaacggtatcgcaattcgggtcaatcatcgttgccagatggccgggagagttctcccagttcgatacagccttttcgggaattctatcgggggtcgtgacggtgaacaccgtcaggttggagccgaagccgtgggggtatatccgtacccagctgacaattcggaaggggtgctttcacgattgttttgcgccgcaacggtcgattcccattttgatttgcaactctgtttgtggtatgctacaatgatctccaaagataggaacgctgatttccagtacgatgctatcgtatagtgcatatactgtatttacagatcgagcggggaggtctttcgtgtgagcaattatgagttttccctcagacaggaagtcctgcttgaaaagggggccgacattctcgggtcactttttcattttgcaaggaataaccatatttctccctctgacaaaaaagatccagttaatgttgtttacggtttggtatggaacgccaagagcagcatcctgggtgcggatactgaggccgaattggatcagatcgaaacgcagtttgattttgctcgtaaattttacgctggtattgaggcgtgagcaaaatgggcatcctgtgatttccggaattaccatttgggatagaacaccgacaaaaatttacgatagctgtgggactgcggagtgtccatccgaagtattacgtcaatattggaacagaccttggcctgatgaggaacttcaggatatgcaacgatctatccttcgactgcgccttaaggaggaggcctgtcagctgaagcaaagcccgtctatcgacgagttagaacgaagggtgcaagaggcggctataggccctggacttacgttcaacacgatgatgtgatggactgaccgtgctcttcgctcagcaagaaagctcttttgagaatggcgtttttaatcaactgaaattgtagatagctctcccagcaggagagctatcttttttgccttatcaggcttcctcctttcatgattgttgagttgctttgatgattttttgcaaacacaacatgtaaaggacccagaaagaaaggcactaaaggattcgacgttttcagacttttgcgaaagcacgcagctctaatgcatcgtcatattccaactgccatactgctgctcctcatgatcgtcctctttgtggccatggacgagacgcttctcccgcagctcttgacggcgcttgcggtcgatgtgggtgagccccgtgccgctctgcggcagggagttgtcctggaagatatttgccatgtgatggagcagtctcgtcactgcaaggaacacctccggcgctgtcgaagcactctgcctttccagaaggcactgcgcgtaactgtgtccttgctccgccgcctgagacagccattggatgcccgcctctttgtcacgctcgaccgccttcccttggagcagcagctttcccaacagatactgcgcatggagattgccggcctgagcggaggtatagatgtgatccatagccttgcgggtatctcttcttactgattctcccttcagatattccttgccaaggcggtaggatgcatcgtggtttccgttgtaggcagcgtactccagccactggatgccaagctcgggatcatggacgctggcatcatcagagagatataattttcccaaagcatactgagccgctacatatccctgctttgccgctttgtcaaaccagtatcgggccatcacccagtccggcggcagcagcgggccgtcccgatacagttctcccataaaatactgcgcatggatgtcaccgttctccgcaagttcccgcatactttccacggcatcatcccgttctgccagtgacgagtattcatcctgaacgtccatacgaagcgtccggaagtcccaagacacatctttgccgttgtccacctcatcgccctgacgcaggtccaaggtttcgtcctcaaaggtgattttccccagccggatcgtctccgcctcttggatgaccgcattcttgatttggcgaaactccttctgccgggacagcggcgggcggtgccgctccttctcagaatagaaatcttccacctgaccttgcagctgccaccactgttcgtagcattcggccacggtcgggagctgctccatctggtccacaatctcatctaccagcgccttttgcttcttcggaagatagccataggacttctttcccttgaccgtttccaattgaagtgcaagctcttgcatgagccgctccgcctcggggtggtcgcagatcctggttcgcatctgctggaccaactcccgcatggcctgccgcacttcccgcaccaactggtcacgggaaaccgttttctgctcatagaggtggagcatttcttgctggaagatatcgttggtgagcttggatttgatttggcggatgccgtcctgagatagatacgcctgtcccggctttacggaccatgccatcatgtgcacatggggatggtcgccctcatcatggaaggcagcataccagcggaagtcctggggcgggatattcatagcggcggcgatgtcgttgcggtgggcgcggaggagattcctccacgccctggcattgtcgtagcccaaccgttctgcgtcctctcgcttcagggagatgatgtgtgtccacacgttacctgtgtagctctccagttccgccatggccttgtccagctccacgccatctttgtcaccgaagagaccatgggagcccagccgttctgcccttggccgtgttgcgatgtacttcatgtagccatccgatttctgaacatcgctccagttttcctccaacgcctgagagatgaacgccgaagcgttggccttggtggggtgttcttggtagtcaccgtactcacccatctcctttgcgtcaggaaaatccttcaccagttttgcgataagctgttcctgcttccttgttggcggacggtcattctggatcaactcgacccgctcacgggtggcgatgtatctcatgtatccgcctgctgagttgccgcctccgcacttgatgtacgggcttttgacgatcagtcttgccatccgtcatcgtcctcccaggattcccgcacccgtctttcgaacgagatgcggccattggtctgtttcacatttcggacgctctccgcacggcgtcggcgcaggtcctcttcactgaactgaaaactgtccgcaatgatcccggacagcatatccaactccaccgcctgcttgtaagccagcgatgccattttgttttccgtttgccccacccgaccgtccagataggactggatggaggtggggaggaacagcccagcgttgttggcactgagatagtccaggtagaaatcgatggcccgctcaatgaatccggtgatgctgcggctgccatcctcctgatatcgtcgctccaagcgtgcctttttctcaggagtgagatagagggcaaatttttctttcttgctcaaaatgagctcctttccggggtatgacccctacttttttcttgtgggtgtaggctttcagggataacgaccgcagaagtgatagcaccccttcgattttgaccccactttggaactccctgaaaaccccgtaactgcccgcactgcgggcagaagtgaccgaacagagcgtcgcacttgacgcctggtgtttatcctgcttcacgtcatcgctgtctccatatccctcgcttccacccaaatgggcgaaaactcgttcatttcgctgctcctccttttcccaccgaacccgcttcgctgggtttcggcgggagcccttattttgtcctccgtcagctctcgaaaggcgacccaaatccgttcgaataggcctggccggtatctgttctcgctgctcccggcaaagccgcacacagcggctcacaggggcgaacacggccttgtttttgcagttcctctgctacccgctgacgctccgtgacttcctccagtttcaccatctgccgctcgtaggaatggtcgacggcttcctggatcggcaggatggtgtagcagttgttgccgttccacttcattccctggcggtcgaaatagctggtgcgctctactgtgataaactgcctgtcctccagtttggcgatgtgtttcatcaccgtgttcacggccagccccacagtggcggagatggtgttgtaactgggatggcattgatggctgctgcggtcttcgcagtagagcaggtaggcgtagacggtgatcgcgccatgccccaggtccagggaaaagatttcgttagggagggagaaaaactttcctgcgtgtttgcgactgaataccggaaccatctgcggcgagatcagatttcgtttgaccagagtatccaactgcttttctgccatgtctggactcatgtggagcagcgctgcaatctcatccacacttggaacggcgccacccctatggtggctgttgagatagcagagataggcgaggatactgaaggcggggggcggaagtttcagcccccaaattttgttgggcagcgagaaccgatacgctttcgcgtctttctgataggtgagcgcagtcattcgcggacacctccttccgtgtgcttggtgacccactggatgaacgcttccttgggaaccaccatcctgctgccgacattcagcaccgggaagtccggctcatgcatcagctcatagctggtggaggacgatacccccagcaccttcgccactatgtcggcgttgaggaacagaggcaggtcatcgtaagagttgtactgtgactgtttcattttcgatttctcctttgcagaaagtaaaggcatcagcggcgacgctgatgcccttctgcttgtattgtgtcggagattttgataagataataaaaagttgggacgaattattttccaggggggacaatttatttcgagggaggcgagcgcatggatggggatatcgttttctatatccacggtgatacgatcgagtacggtggggaattattttccacaggcgaactgacagcggatattttgaacctgtcactgaaggactatcagtgcatccataaaaacgtccagtgcatgaaggaccttgcggagcagtacgagcgaacccaggaccgggaattttggtggaagctcaaccaccagttcgtggctttgcgtaagcggatgatggagttccgggtgtttcagatcctgcttcgggatgacagcaaatttttcgacgagacccagcagtacaccgagttccgctccttgctgccggaagaagatctggactatgaggatttttccatagagcaatggggagacatggcggagcaggcggagacaaccggccagatcccagttccgcttctgattattcccggagggcggaaaacgaagtggagttattatcggaagcagatgaagcgctatgaacgctatctgggcgacgtcgcgtgcttcaatcctaccatccataacttcatccacttcctcctcgccaagctggagcataactccccggagaactatgccgcctccctctatcagctctacaacgatgagcggctggtggagaagctgatcgtcaatcccagaagcctggagcagccgttttatcagaaatatgaccactgcgtcgtgagctatgtgccgcgggagctgccggacaagcgcttcgccatttgccaggagcacaccaccgacagcttgcagatgctgctgaaggcggattacatgacggcactgaatgccggacacaacatccgccagtgtgttgtctgcaaaaaatactttctggtgaagggcggcgctcatgcactatattgtgagggagcatgtccccatgcgccccagtatacctgccgacagttcggaacctacgaagtgcagaaggaactggctcgggatgtgccgaagctccaagcgaagctcgccgcttttgaacggatacggcaggaccaaaagcgcgacgttatcacggcggaggaagcacggcggctgaaggatacggtccgggacatgctgttcaatgcgctcaacaaggcagatgtctctaacgcggactttgagcggtccatctccagtgagagactttacccatactgcggtgttacccggaaggcgaaacccagagggcgtccccgaaagggtggtggggacgcatgagcgaccaagaattgctggatcgaatcgcgcagggagatcaggccgcgctgacggaactgtgtgataggtatgctgaattgattcggaaacgtgcgcagtggatcgcccgacaatacaattgtctgcgccccggcagtcacggaggttggagcgactatacgaaagaaacgctctccgaattggagagcgttgggatgctgacgctgatcgaatgcgccatgaatggcggctatgatagctccaagggagttttcggaacatacaacgtaccatttctggacggcgcgatgcggcggcacctggaagccagcatgggtaccctttccctggaccgggacagcatggggctggtacgcaaggcgcagatgctctatcaccgggatggaaaagagatgagcgaaatcgcaggggagttgggtgtttctttagcggaagtagccagggcggtagcctatcccacgcatttcttctctgtttatgacttgccaatcccggaggaggacggagatatttttgagtacctcatgtctgatctgctgtctgcatctgcggaggagattgtccttcgggcgcttacgatgaagtctctgcatgagcagttccaaagcctatccaagcgggaacaggatattctgggcaggagcttcggcgtttttggttactcaaagacagacctgcgggagatcgccatccgaaacagactgcgggaggacggcgtggagaaggcgaagaaacaagcgctgaaaaaactgcgggaatggtgtctggacagcatggcatggaagctccgccgagccagacacatggtggaccgtgcgatttcactggtgccaatgcattgaatggagttgagaccagaaaagagctttctttgtcaacagtatcgcattattaagatagcgaaaacaattgacctactacaactatgtggacctgaatggcgacggcagcaacgaaatcttcgccgtagctgtggggccttacaccagcggcagcggcggcgattccggaatgtggctgatcccttacgcgggtatgacggtctcccagtccttcacgctgatcagaactcccatcatcgtcagcgataccacgaccaacggtgcccatgagcccatcctccagcgcagcggcggtggagcggagacggaatatgtgcggctggtctgctcggacggcgtttacagcaatcccgctgatgccgaagtggtggaagatttggccgctgttaccggaaaggccattatctccaatgacctgactgtggatatgcagtccggcgactatctgacgctggcggatgctgccaaggcggattaaagtaaatcgactgcgaggaggaattttgataaagcggatactaagtttattgctgacggcgatgctgctggcctgcctgtccagttctgcgtttgcggcagaaagaaataaccccatcgacccttggacgtatcaaagtcttctgggccgtggaatggatgtagactggtgcaagaccagacagggcatggagacgtatgaccggcagattgtggagaatttccgggatatggggctctcccatgtgcgcatccgcgtgaaggatgatgccgacgaacagctcttttccgttctggaccgggtaatcgatgactgcctggactgcggcgtcattccggtgctggcttatcaggcggatgacatgaaaaaccagcccacacagaaaaacatcgaccgggtggccgactggtggcagaccgtggccgaacggtatcgggataagtcctatcggttgtccttcgacctcgtcattgaggtgacgaacgctctgaacgataagcccgaacttctgaatgatatttacgagcagttggtgtccgtggtccggaaatccaatcatgaccgcatcctgatgatctccccccgcctgcggtccgattcggcctatctatctgatttggagatcccatctgatgccaacggatacctgatggcggaatggcatttctatgcggcaggtccgtccaagaccaatgagaaaaaactgtggaccacaggcactccggcagaacggcagttggtacagagtaagatcgacaaggcgctccaatggcagagggaaacgggcatccccacctgggtgggcgcctggatgccgggaaattacaacgacggaaatgactatacgctggatgaacagctggcattcgcctccttcgtggcgcaggcactggaagatgccagtatcccctttgcggtaaactcggatacaaaattctacgacagagtggaaaaacgctggtattctgagatgctgccgctgacaatggagctgtttcagccggaatcgctgcctttttccgatgtgccggaaggggcgtggtactatgattctctcctgtatgtgtatcaaaacgggatattctccggtacttctgccacgactttttcaccctatcagaatatgacccggcagcagctttggacggtgctgggccgtatggcgggggagaaattgtccggaagcggcgtatacagcgccgccagatcctgggcgatccgggccggggtgtctgacggttctgatcccacaggtacgctttcccgacagcagctggtcatgcttctctggcgtttcgctggggagccgacgtctgtccaagacctttccggtttttcggatgcggcacaggtttcctcctatgcgaagaaggctatgagctgggcggtggaaaatcagattctgacggggagcggcggctgcctgctcccacacggaacagctacccgcgcacaggtggccgcgatcctgagcaggttcagcataggctcgtaaaaatgcgttcaagttggttgagacaataaaagattccttttcatgtgttggtgttaagctttcggaaaatcgttcgtcaaaataacggaaagggattcgcttgtaagttagtgaatccctttctgttgcccgacaaactggaattgttatctttctattgccttctcaatcatctcagttttttcagcccttcccatcagccgagatagtatttgcaccataacgacggtgattgtagcgggataacttctgtttccagcggcattttctccacgatttactctttgcgtagagcacaatcataaacctttccatccttcacgattgcaaaaccagccatcacatcgacctcgacagaatcaataaagaactccataaaggtttttgcccggtacatagggtttggaattgaagcagatggaaaactttcacccatttccgataaaattgtgcggacgcattccgcatcacagtcagtgaccattaaatcaatgtcgtggaagtcggaggtgatgcccttgaaatacagcagcatggatgcacccaaggcccattcgacacctgcctcgttcagtcgatgtacgattcgcaacagcaactggattttttcttgtgttttctccatacggttctccccgaattatcagagcggctgcatcatttcaaggataatgccatccgggtctctgaaataaaaagctcggctttccccaaattcatttgctctgaaatcgaaatattgcggctcagacaagcactccacatgattttcgatatcatgaagatctggcgcacttagcactgctgataataattttggaaagttttagtgtgagaatacagattttgcctcggtgatgaacgctttcaatgaagggttgtcttgtatggatttatagtagatgccaaaagaagttggattgacccccttgatcgggatttttacaagtcgatggtttacggggatcaaaacctccggaagaacagaaattccttatccggaggatactaatagggagaactatgcgcgtgaaagtgtggaatgaccatgggaatcccgtcaaactgctccacagcggcatccataccgtagacggcccggatgttctcggacgtcaccgcttcccggccaccggaggcatacacggtgccgtccttcaaaaacaggaaacggtcgcagaaccgcagggccaggttcaggtcgtggataacaaccagcacggcgatatggtggccgtgggcgcagtggcggatgagctccatggactcgtattggttgcgggggtccaggctgcttgtgggctcgtccagcagcatcagcttcggctcctgggcgatggcccgggccagcatcaccttctgctgttcgccgccggagagctggtttacataccgcaggcggcagttttccattccaacggcccgcagggcgtgctccgccacatcatagtcaatgtcggaggggccccatttcatgtggggcttgcggcccagcagcaccgcgtcgaacaccgtggtatgggccagctcatttttctgggctacataggagatctgctgtgcctgctggcctcgggtcatttgagtgacaggggtgccgtcaatcaggacgctgcctgacgaggggcggcggagacggctgatacaggagatcagcgtggactttcccgcaccgttgttgcccagcaccgccacgcactcgccctgctccagagaaaaactcacgttctgcaaaatggggcgggagccataggcaaaggagaggttttgaacttctatcatcgtagcgcctcccctctgaaaatcagcagcaggaacagcggcgcccccaggagggacgtgatggcgccgatgggcagaatggcgggcggcaggatgaccttcgctgccaggtcgcccaggaggagcaaggtgctgcctgccagagcggaacagggcaggagaaaccgataatcgctgcccacgaaccggcggacgatgtggggggcgatgaggcccacaaagctgacaatgcccacgaaagccaccgccaccgaggcgatcagggtgcaaaggcccatgctgatatagctcaaaagatccacgcttactcccagactcttggcggtttggacgccgctgctcagcgcgttgtaattccagcggttccagaggaagtagaccagagccgccaaggtgaccgcgtacatcagccgaatttccgaccagccaggacggcccaggtcgccgaaggtccagtagaccacggtggacagctgcacgtcatcggcgaagtattgcagcagggtggtggccccggaaaagagagaactgagggccacgcctgccaaaatcatggaggagggagaggcagaccgcaggcggcacaggataagaatgaccgccgttgtggcaagcccccccagaaaagcacagagggtcacggtgccgggggagctgatggtgacggcagtacccgcgttggcggcattttgggcgccggcatccagggcgatgatggcgagggccgcgccgaaggcggcgccctgggatacgcccagcgtggaagcagcggccagtggattgcgaagaacgttctgcatcacgcaaccggacaacgctagggcggcgcccaccacgatagccacagtgatgcgaggcagacggacgtggaatacgatggctcggctctgggctgtgccgccgcctgccagagtgtccgccagctccgcaagggaaagcccggcggagcctgtggtcagggacagcagggctgccgccaataccgccgccagcagaacaagggtcacaagccgcttccgccggagaaacaggcggtagctgtcaggtgtcgccgtatgaagctgttcactgtgcagatccaagttcaatcactccaaaggtgaggccgttggccttcatgtcgttgtaatagcggcgtcccagcaggaattccaggatatcgtcggccttttcggcaatattcacgtcatcaaagcgctcaggatagatgacgctgccggcatagtaggcgtcagccagggcgtaacccacgttggtggaatagttgttgaaggagacgcaggcgtaaaggttgccctcccggaccgcagtcagggagtcaaagaagccgggattggtctggtattcgtcccgaacaaggctcatgttgccggggtccaggaaaatcagctccgggtcccaagccaccacctgctccgggtcagcgtcaaagtagccggtctcgcccatctcgtccgccacgttgttagcgtggatggccataagggggccgaagttggagtaagtcccggtaaagccgtgagcgccggagaaggtcacggcgccggcgtaaacggcaggcttgccttcgtcagggatgtccgccgtccgggcgtccaggtcagccttgcagccgtcgatgtactgcaggacttcctcgcaccgctcctgaacccccagcacctcggcggccacccgcatggcggtgtaaaagctgtcgtcgatgaagttgatgctcttggcccggatggacacgcagggaatcccggtggactgcgccagatcttccagcgcctcctgggtatagccggacagaatgacgtccggctgcaggcggatcaactcctccacgtaggcggtgttggcggtgccgccgcccttgccgatggagggcaaggcgtcaaaggtatcgtgataaacgtaggcataatcccggagggtggaatccgcatattccttgtcacagtcttctacgcccaccagccggtcagtgcattgcagataggtcaccatacgcagggcaccggagccggtgcacacgattgctttaacttcagcgggaatggtaacctcacggccgaaactgtcagtgacagtgcgggcagcagaagactctggctcggtttcttgggcggtgggggatttttggctgcaggcggccagagacagcagcagggcgcagaataatagggcggaaactatttttttcataaaagtgattctcctttatcggtcgtagggatggaaacagtgcaggcagaccaccttgccgtcctgcagacgggccatgtgctctgctacgccctcaccacagcaggcacaagtgagtgtggtgaagatgcgggctttttcaggcagaggctctttgggcacagtcacgctgaatagctcttctaatggtgcagtataaatctgctgcttacgttcctcacggctaaggggtgtctgattccgcttggcaattacccggaaaccttcaccagtggcacggtcaaagaaggtataggcggtttttccagtgcagtggtagataaaattccccttgcccagagtacagcccagcagagcctgaattgcatcgccggggcaggcgtcagtctcagcgatgcagaccaactcctcatcgtgggcggacgtccggcccagacgtagccgtacaaactcgcacaggcggacgcccaaagccagaccaggacattcatggccatggaatgccaccgccttttcccacatagccttatccattctgcgatacctccccgcggatggcggacagcacgtcctcccagaccttctggaagggcagcccggcagttctggcggcagaggccacatcctcgtattccggctttttccggtggatgccctcgccgtcggcgcacttgacgcggatggggccgtaggcggtctccacggttttgacagagggcgtcagaatgtactttccgcaacggcgggtgcggacgccgttggtggtggtctcccgcaggatggcgtgggcgatgcgcccttcgtccctgggcttgcagagcacggtgaagctgacgccggcccgaccctttttcatggtcaggggcgcgcaggagatgtccagagcgccctgggccagcagttgctctccggcaaaggccagggcctccgccgtcatgtcgtcgatatggcagcacagctccacgatctccgcctgctggggggcgccgctttcaccccaaaaggcccggacacagttggcggcggggaattcctttttgcccacgccgtagccggtcttctccagagacatgacaggcatggggccgaagctctcagcaaagtgggtcagcagggcggcgccggtgggggtacacagctctccccggatgtccccggtgtagcagaggacgccctccagcaggtgggcggtggcgggagcgggcaccggaacgatgccgtgggcgcagcggacttggccgctgcccagatggacgggggatgccgtgatgtggtcggggcgcagcatatggaccgccaggcaggcgccggtgacgtccgccaccgcgtccagagcgcccacctcatggaagtggatcttctccaccggcatcccgtgggccttggcctcggcgtccgcaatgcgggcatagatggacttggcggcatcctttacctccgccggggcatccagggcatccagcagggcggcgatgtccgccggagcggtgtgatggtgggtatggccatggtcatggtcatggtcgtgatgatggtcatgcgcatggctgtggtcgtgctcatgatggtgttcatggatatggtcgtggtcatggccgcagcccagagccacatcgtggctgtgctcctcctcgccgcggacggtgacgtccatgtgggtgccggtgatgccgcaggtaacagcctgccggggctgaatctccacgccggggaacaggcggttcatggtctccagaaaatcctgcttttcggattcgctcatcagctcatacagcgccgccatcagcatatcgccggcggcgcccatgttgcattccagatataatgtcttcattctttcgcactctccatctgattgatccggccggccaagaagcccgcgccgaagccgttgtcgatattcaccacgctggtcccgctggcgcaggagttcagcatggacagcagggcggagatgccgcccagggacgcgccgtagcccacactggtggggaccgcgatgacggggcagtctacaaggccgcccaccacgctggcgagggcgccttccatgcccgccacggcgatgaccacccgggcgctcatcagcggctccaagttgcccagcagcctgtgcaggcctgccacgcccacatcgtaaagccgggtgactcggttacccagtgtctcggcggtaatggcggcctcctcagccacgcccatgtcactggtaccgccggtggccactacgatggaaccatgtcctttcaccggctctggaagggccaccgccaatttggcgagaggctcataccgcagcgggaactgctccgccaggtagtccgccacctcctgcccaatgcgggtcaccagaatattgcggcttccccgtttctccatggcggccagtatgccgccgatctgctctttggtcttggactggccgtagatcacctccggcacgccctgacggacggcgcggtggtaatccaccttggcgtaacccaggtcctcaaagggggccagcttcaggtgcagaagggcatcctccggcgtcagcgcaccggactgcacatcctgtaggacagagagaatatcgtgcttgcttgccacgtctgtcactcctttcagtcgctgttttttcgggccgttagatccagagagaacaacgggaagatggggcccagcccggagcggatctcatggcgcattgcccaggcatcatcctgctggtcttccgttacctgaataactgccgcgcctccgcggagcctgatgcggaaatcccggaagcccatggaggcaagaaggtcctctccctgctccaccttccgcagagcttcctctgtgatgggagtcccggcggggatgcgggtggcaaggcaggcgtaggagggcttgttccagacgaacaggccggcctccctgcacagcgcacggacatcgcctttggtcaggccgcactcccgaaggggagagcggacctctaactcccgcagggccttcatgccggggcggtcacccgcgtcatccgaggcattggtgccatcaatgaccagggaatacccatcggacgcgccctgccggaggatggcagcaaatatcctgtgcttgcagtaatagcatcggttcgcagggttagctatcacttccggatgctgaaagatgtctgcctcaatcacagtcagtggcatgccgcattgtgcagcgacctgcttggcgtcttccagttcaaatgcgggctggaatgcggaatggacataataggcacgccagtcccggccatatttcatggccgcccagaccagaagggacgaatccactccgccggaataggccactgccccgcgcggattttgctcaaaaaaatctgataactgcatattgcacccctaaaaaagacaataggaaggtatctgccccctttgagagggcaaataccttcctggcatttagtttcgtcagttcttttatttgataatggaacggtaagacttatacagcttctgccgattcatccggcttctgccggattctaagtctgtaaggatgtaactgaacaatggatcgcaccactaacacagcgctttccaccaatttggacatcgactgttcaggaacgccggcaatatagttgtcgcaaagattcacgggaacaaaaatgcgctttgcggaactttgtccaacagcaagcgccatcgttggcgtaatctctccgtacatggaatccgcgatggcgatgccagaagcgccgacaataatatccgccttgcggcaattcacaacaacagcattttcaccagtggcggcatgttctgcaccggctttgagcatagcactcgttgctaatgcattcgtgccaaccgcaataatctcagactctgggaaagcagcttttaatgcagacaccagttgacgcccaagtccaccccctgtccatcaatgacaagtattttcatgcagttgcaccacgcttcctgtttcgtagaatatcgtcaaagtttcttgatatgttaagtatagcatgggataaaacaaaaacaaaatgctgattttgcatggattttacagtttttaattccgcataggaatgtcatttattccaagtcctacccaattttactgctctcctgcattctcagattcctgtttgttttcatataaagtactacagaaataagaagggcaagcatatctgtaatagtctgtgcccaaataacaccatacattttaaaaactgcattcatgagaagaatcattggaatataaatgataccctgccgacaggcagaaataatcagagcttcttttcccatacccatagcctgaaacacataacatatctgaaaattgaaaataacaaaaggcatcgcagtgcaaacgatccttaaaaaatccgccgcaagtactatggtagtgcgttcattaatgaatagtcgaataatctgcgatggtaacaattcataaacagtgattaatacactggcaaaagccatgctgaaaatcattgcacaccgaattgtttgtctcatgcgcgaataatttcctgacgcataattataagccacaagcggcaacattccttgacctattccaatggccgcgctgtatggaaattgatatacgcgctttataatacccgctgctgccaacggaatatccccatagtcagctgccatccggttcacaatagtattcgatacacaggtcagcatcgtgcccaatgcagttggaatgcctactaccaaaaccgagaggatatgtttcttgctttggaatattcctttcagcgaaaggcaaagaactgtcctgtttttcaggtggaaaaagcagatcattaaaaaaagcgttgaaaacacatttgacagcatcgtggcaaccgccgcacctgtcacttccattccgggaggcaaaagtccaaacataaaaacagggtccagaatgatattcagaattccacccagaccgatcccaagacttgcttgcctcgcatagcctacgctccgaagaatatgggcggcagttatgctgagtaccgtagggacgccacctacaataattgcccatacggcgtattgctgtgcatatggcaaagtatcattactggcccccataattctcagcaatggctccatgaacatgaatacccccgcagaatacacaagtgacagcaagagagccccatacacactaaacgcacaaatatgcctggcactttctttctcgaactttccaagcaatctggatatcaggctcccgccgccaatgccaaataggtttgcgattgccgtcaagaataagtggagaacaaacgccagtgatagtgccgctactttatatgggtcgtttgtttttccgatgaaaaaggcatctgccagattgtagaccgtggtgattagctggctcaaaatcgtaggcagggccatagctgccagagcctttggcacaggcatatcctcaaaaatactctgatcgatgtccttgttcatcctcaacctccaataccagacaatttggtcattttatattataagcaggcagctaattttggacaattctcattatgaatgagaattacccgatctcatgcaacgcaggaatctatcagcaaaatcgttttttccaagctgagattcatagaaaacgcctatcccctacccgcacatattcaggaattcgtttacctgccctccacagctaccagtattgttctgaaccacaccaaaacagtagtaataacatcggtttgcgagattgactactacttccggatactgaaatatgtctgcctcaatcacggttgggggcattttgcattgaatggcgacgttcttggcagtcctccaattcacatgtgggttgaaatgcaggatggatgtagcaggcacaccagtcccggccatatttcatagccgcccagaccagaagggatgaatccaccccgctggaaaaggcactgtccatcatggattttgttcaaaaaaaccgataactgtatattgcacccctaaaaagacaacaggaagatatctgcccccttcgagagggcaaatatcttcctggtatttttgcttcatcagttcttttatttgataacggaacgataagactcgtacgacttctgcgctaaaaatgcataagcaaaaacagctcctataacgcagatttaatatgctaaatttggtagtctgtgtgcagcagatgatgggccttctcccccaggggctttttcaggtaagtccggtacagctcctggatatctgggttctcgtgagagaagcggatatcggccttggaatccagcttccacagctgactgccgcgggaggccgccatctccacaccctcgtggatgggctgaccgccgccgccggcgcagccgccggggcaggccataacttccacgaagtcgtagtccacctcgccgctgtccacggcctccatcagcctgcgggtgttggccaatccgctgaccaccgccacccggacctttccggcgccggggatctcaaaggcggcttccttccagggcttgctgccccgcacctgctcgaacgtatccgggtcggggttcttgccggtcaccagatagtaggcgctgcgcagggccgcgtccatgacgccgccggtggcgccgaagaccaccgccgcgccggtgccgctgcccagggggctgtcgaactccgcctcctccagctcagcgggcacgatgcagtcactgcggaacaggcgcaccatctcccgggtggtcaacaccatgtccacatccgggtcgccgcaggcgtccttcatggtgggcagctcgctctccgccttcttggcagagcagggcatgatggacaccacaaacagcttgtgggggtcgatgcccttcttctccgcgaagtagctcttggccacggcaccgaacatctgctgggggacttggcggtggacaggttctccgtatagtcggggaactccgtcttcaggaaccgcacccagccggggcagcaggatgtgaacatgggccagcggtacttcccacggtgggtgaagcgctcgatgaactcactgccctcctccatgatggtcaggtcggcagagaagttggtgtcgaacacatagtcgaagcccaggcgcttcagggcggccaccatacggcctgtagtcccctgccgggggctcatgccgaattcctctgcccaagccacccggaccgccggggccacctggaccacggtggtgatctccgggtccgccagggcccacagaaccttgttggtgtcatcccgggctgtcagggcgccggtgggacagtgggtgacgcactggccgcagaacacgcaggcggtgtttttcagatagcggttgtagctgacatccacggtggtgcgggagccggtgcccgccacgtcccagatgtgcatgccctggatcttgtcgcagacctggatgcagcgcatgcacttgatgcatttgctggcctcccggacgatgggaacgctcaggtccacattggagcgctctggctgcaccgcatagggctggtagtggatattcaggtcattggaaagcttctgcagctggcagttgccgctgcggacgcagaccgtgcaattggagttgtgctggctgaggatcagccgcagattggtcttccgggcctgccggacccggggagagttggtctggatcaccatgccctccgccacctcggtgttgcaggcggggaccaggcggttgacgccctcgatctccaccatacacatacggcaggcggcgatctcgttgatctccttcagaaaacacaggtgaggaatggggatgccggccttctcggcggcttccaggatggtggtgcccgccgcgacggacatctcccggtcattgatcttgaagtttaccatttctccacacgtcctcccttgaagtttccgtagccaaagtgatcgcaccgcaggcagcgggcagactcctgggcggcctcttcgtccgtcatgccgcactcaatgcactggaagtcgcacttgcgctcactggcgtcgcgctcactggaattcacgcggccatggggatggattcccttgctccaggctgcgggcaccgtgacatccaccttgatctcatggttgaagcccagatattcgtcgatgttggcagccgccgccttgccagccgcaatggcacgaataacggtggcaggaccggtgacgcagtcgccgccggcgaacacgccctccatatcggggatttgggtgctggtgttagcgtccacgttgccgccgcgctggatcttgatgccgctctcctccaggccccgggactcgatgccctggccgatggccacgatgaccgtgtcggcggggatccgcagaggctccacggaggcggtgttgggccggggacggccggccttgtccatctcgccgatgatctggggctgggtccagagggccgtcacgtggccgttctcgtccgcctcgatcttcagcggcgcctggagggtcaggacctcggcgccctcggcaatggcgccctccacttcctcctgctgagccgtcatatcctcctggcggcggcggtagacacaggtgaccttggcggcacccaggcggatggcgctgcgggtcacgtccatggccacgttgccgccgccgataactgccacgttctggccggtgaagtcaggcatctcctcgtcgccgatgcggcgcagcatctccacggcggagatgacgccctggctgtcctcgccctcaatgccggtctttttgtcggtatgggcgccgatggagatgtacaggcagtcatgctccttccggagctggtcgaaggtgacatcctggcctaccttcacgccggtcttgacttcaatgcccagggacaggatggagtcgatctccgcgtccagcttctcccgggggaagcggtagctggggatgccgtagcgcatcatgccgcccagcttggtctgctgctcgtagaccgtgaccttgtggcccatgagggccaggtagtaggcggcggagagaccgccgggaccgccgccgatgatggcaacggacttgccggtagcgggagccttcttgggctggggcacattgccggcgtggtccacagcgtagcgcttcagcccacggatgttcagggcgtcgtccaccatgttccggcggcagcgggcctcgcagggatgctcgcagatgtaggcgcaggcggtggggaagggattgtccttccggataagccgcacggcatcggcgcagcggccctcgttcaccagggagatgtaaccggggatatccacgccggcggggcacagagccacgcagggcaccgggttcttcaggctgcccaggcagcggtggtggagaatgtgctcctcatagtcatcccggaaacccttcaggcccatcagcaccagattggcggcgtcaatgccgatggcgcagtccgccgtgtccacgatgacctgggcagtggcctcgatccggtccaggatcttcagctcgggctcgccctccagcacctcccggatcatgttggaaagctgggtcagtccgatgcggcagggcacgcacttgccgcaggtctgggcctggcacaggttcaggaaattcagcgccatatccacagggcacaggcccggagggctggcggcgatccgccgttccatgttccggtacagctgctccaccacagcctgtgcctgaccaggcatcttgacttctaatctgctcataaacctttcttcatccctttctgtttccattcggcagatatatacattttcttttctttcgctttgatttcccaataaatcaggaatgtcagaatttctcacaatatggacgcatgtagtttcgtgcggctacgttccctctcagattgaatatgcagtatgggtagcaattgtaaaattgctacccatactgggagagagtatatcccattgggaggtgaaaccaacaggatatggcaacgagcgttctccttttctctacaggctatcccgtctattttgaaaagattatcttcagtgagatatgtagaaacccaaacttttacaaagccagtattacgcaaattatcgcagttttagcgaatacacctatagtttgaatatctgcaacaatcatttttttctacgcaaaaagcataacataattacgcaaaaatgtgaaattctccttttttatagaaatttcggaaaagcaattctaaatacgcatacattaatcaagtcgaaagtaattgtaaaaagggaggaattgcatgctttcttttcatgatctataatttattccacgtattttcatctccacaagttccttagctccacccgaacccgtgggtttctcggtcagggaaatgacaggaccatatgctttcatgcggtcctgtcatttctaaaaattctattacatgttgtaaataagttcaaaggcgtcatgcacagccttaaaaatatttgcaggtttcttgcaagagccgatctcatatacctcgataccagtgccaatcagagcttctttcatggacagattggaacgcataccaatggacatcacgaccgtatccgcctcaagtgttttactttccccatccgcagactgaatcactgctcccgcatcattgatctccaacagccgatttccagtatagacgggaacatggtagtgctccatcagatcttcaagcatggacttgcactggttggggacaaattccaggctcatgagattgggcatggcttccacaactgaaacctttttcccctgcaatgcaaaatgcatagcagtctcacagccaatctcaccgccgccaacaacaaccaccgtttcaccaacaggtttatgcccttccaacgcatcgatagcggaaacgctcttgggatgatcaattccgggaatgctgcgcggcataacagaagatgcaccaacagtcaagataactacatcgggatgcgcggaaataatatccctatgggtaatttccttattcaggacaatattcgcattcagttccttaagttcacgctgataccacagattcaaatctgtgacctcgccctttaagggacggttgcctgccgccagcagttcgccgccaaggtggtcagacttctcatacagtgtgactgtatgtcccgcttgaatcgccgcacgagtcgcttccatacctgccacgcctccgcctacaaccataatgttcttgggagtcgttgccttccggggcggatagaacgattctctcattgctctgggattcacagcgcatgcgggagggaggccctggtcttcaacgcggccaatacagccaaagttacagccgatgcacgggcgaatcttttcaggcatgcccaactctgtcttcttggggaattcaggatcagccaaagaagggcgggaaagaacgaaggcatccgcttgtccgtctctcagtgctttggcacaaatccagggatcacccatacgagaaccagccagaatggggatcttgacagcttctttcgccttagcatacagttccaatccatgccccttcggcatataggcggggggcatgcataataaaaggaatcgtatgtaccgacatctacactcagcgcattaactccataggactccaacatcttgcagatttcgatgccctcttccaatgtacgccccgcctcgttttctcccgtcagagaagccttgttgaacgccttaacgtagctcttcaagcccaggcgaacagaaatcggataatcatcaccacaggtttgatgaattccctcgataatttctttgacaacacgcatacggttttccaatgtgccgccatattcatccgtgcgctgattggtcatggccatgacaaactgatccagcagatagccccagtgcacagcatgcagttcaatgccgtgaacacctgactttttataaagttcagcagtcttgaccatcagttcaattttcctcttgacttcatctgttgtaagcgcggtagaagtcatagatgggatgctgtaaataggcagcggagaaggggtcttaaatcctggcgctgttcttcctacacccatcgatgcctggcaaaacagttttgtatcatacgcccccaggcgctctaccaaccgttctgcacccctgcgaaaaacagtcggattatacagtgggctcttcatgcttttggggtcaaaataatcgatctccgtatccgtgaagagaacgccagtggtaatgaggccaaagccgcctttggcccgctccaaaaaatactcttggacaacatcattccaatcttgcaaggaaccctgaataccggaaatgcccattggccccatgcagaagcgatttttgatttggaccttgccaatgttgaatggggtaaacagttggttcatgtcttcctgtgtcacttccggtgtattaggatgatgattctcgtacatacttccgcctcccagtaaaatgtcttttgtaatgatagggcatccagttgcgctgtgtttattacgtgatgggttatttcaattatatctttcgcaagaaatgttgtgaaataccggtttctgattgttttgaaggtttgtttatactttttttgcatagagatatggcatgtgccttatgactttgtggagtattaacaaggggctggttttcaaatttcctcttgccaagcatagttttttgtaataacctgaaattaacagcataaaacctgattgaattgccgcgatcattgtgtgggagggcttttatggactataaaagtattgtctgctttctgcgcgtttgtgaactgcacagctttactaaggccgcagaagacctctatatttctcaaccggcgctgagccgacgcatcctcgcgttagaagatgaactgggcgtaaaactattggatcgcgcaaacggtggcttgcagctcacagaaggcggtaaactgttttattcggatgccaaaaagctcatcaatgtagaagcagctttaaagcagaagatggaaaagcaccgtgatggcttttacggcgaggtacgtatcggatatagttcttattgttttatggaacctctcatgcatgctgcgcatatgttgggagaaacctatcccaacattgagccagacttccagtctatgtctccccgatatgcgatttacagctttttacatgggcaaatagatatcgcttacctttgccggggtgatattcctcaaacaaacgattctgttattgaggtaattgcaaaggcccagtctgtcattttaattcccaaaggccacaaactatgggacaggcaatatgtaacatgctctgatctggtgggagaacggtttgcaatatcaaaaaccaaaagccaggtttcggattccatacgtgagagctttgaagccaaaggagtattccttgaaaacgccctacaatgcgaatctgcaaacaccaggatctttcaaatcgcaactggaagatatatcggcatggacggagtatattcatctaaatatttcgattattatgcggattgcattcgtgcgatcccttgcgcggatatggattttaactttgctgattattgcgcggtgtatcatccatccaacggaaatgcggaacgctttgtgaactgtatgatagagaattctgaaaagcagaaataaataataggcattcatgctcgctgtccaacttggatggcgagcatttttttgctgtaaaagacagacaccctatgtcgaaagcgaatgataaggcacgcattttgataattagccggcatttcacataaaagaggcagtgtgatagagtgaaaatgtaagcaaattggataaaaccgcatatccagcttcaaaatgcaaggaggtaaaatgatggaagttcgcgaaaaagtgtccaatgaggatctgcaggcatatctgaaaacgctcgtagaaaagagcaaggttgcacaaaaacagttcgaacgcgattataccaagcagcggccgatcgatgaggtcgttagagcaatcggcaaagctgtgtgtgacaatggcaaaaccttaggtgaagaggcatttgccgaaaccggtatgggcaatgtggaaagcaagattgccaagctgacgaatgtggccctgctccagtgggtccagatgcgcgggaaaaattcagtggagtacgaggattgtcccggcgaacccggcgtcaagtatctgcccaagcccatgggtgtaattggtgccgtaatgcccagcacaaatccgattgctactatcatcggcaatgccatgatggctctgaagtgccgaaactctattatcattttgcctcaccccgcttctgtgaaggtctctatgaagacagtagacattatgagagcggcactggaggaaatcggtgccccagctgacctggttcagtgtatcgacggtgaatacgcaagtattgaagcgacgatgcaaactttgtccatgtgtgactgcaatgtcgcaactggcggtgccgcaatggtgaaatccgtttattctgtcggcaagcccgcttttggcgtcggccagggtaactgccaggagatcatcgaccgcggcatgacagacgaagaatatgagcgcctggttaaactggctattatgaacagaaccgtcgacaatggcgttccctgcggcggtgaacagactgctcatgttcctgaagaacttctggataagtatctcggcttcatgcagaagaacggctgcttcctggtcgacaatgacgatgatattgccaagctgcgcgatgcgattttccccggcggaggcaccagcatcaacagaaaggttgtcggtaagcagccccatgaagttggcgtaatggcgggcattgaggttccagaagacacaaaaattctgcttgtgaagaaccaggcctggggcactcgggacgttctctgccgtgagattctgttccctatcattcgctataccacttatcagaagttcgaagacgctgtcgacagagcaatcgagaatctggaagtcgagggaaaaggtcatagcagctgcatctggagccacgaccaggagcatatcgagtatactgccaaacgaattccggtgggacgcttccacatcaaccagcccactgctggctacaacaatggtgtcagcaagacgattaccattggctgcggtacctggggcggcggtttcccctctgagaatctgcagtattatcacctgatgaataagaccagagtgtctgtggaactcaagaaccccaagccctggtggaatgagggatgggacagcttcgaaccgttcgacatgggaaactgaccggagtatgactatgaaactgtatgagggactgaaggtagtcgaatttactaccaatattgccggtccgactgtgggacagtggcttgccgaatacggtgcggaggttatccacatcgaaaggcccgtcatcggtgatgacagcagagcatatccgccattggtcaacggcatcagcatcaagtattgtactctgaaccacggaaaaaagtccgttatccttgatttaaaagacccggatggaaacaaaattgcccgcgagctctgcaaggacgccgatatcgtactggaaagcacccgtcccggtgtcatggaccgattgggactggggtatgaggctatgcatgagttgaatcccagactgatttactgctccgtctcggcatgggggcagaccggcccctatgcacaccgccctggttatgacctcattgcgcagggtgcatccagtattatgtattacaacggtgacgaagaaactggccctgtaaagatttttacagaaattggcgatcagtgcggcggtttggcaggcttcgctgcagtcaatgccgcactgtactaccgcgaaagaaccggcctggggcagcatgtggatatctctctggtcagagtcctggcatctatgtctgtaaaactggacgatctgcgtatcctccacaaaaagacagagaaacagggcaatcagggttccccccttctgtgcccttacggtgtctttaaatgtccggatggcaattggatcattatagccgcgtccaataacgctttggcattccagttcttccgggtcattggccgagaggatctgatctccgacccccgctttgaaaccaacgtaaaacgtgttgaacaccagaagatcctggcacccattatgtacgaatggttcgacaaaatgggtacgatcgacaacatcgagaaggcgcttctggagggcggagttccttgttcgcgggtatacagttatgaagatgtggacaaggatccacattatcatgaggctggttggtttactgatattcctatgcccgaagaaatgaccgatctaaaggcccgtaggatcgtaagcagtccctttggtttctccgagatgtctcctgagtatattcccaccaagggttttggcgcatggaaccatgagatcatcggggaattgggatatactcccgagcagatcgacgagcttcaggagaagtggaagcaggctatggcaaaaaattgattagcagtctgtatatgagtgacatgaagaatcatcctgttacatcgctcacttatcctctaaaagcttcttcccacaggaagatagcagtgattggcggcggtatcgccggcatggaggcggcttctactgctgcggaatgcggacatacggttgaactgtttgaacggcaaagctctctgggggggaaatgatcccatctggcgcatgtgattcgaatggtgaaattcgcaaacttcaggaatggatgctgtgcagactggagaaacagggaatttccgtccatctcaatcgagagatatctgtcgaggagatccggtcttcgggatttgatactgtcattcttgcaaccggagcgggcagcacggtgtctgaccctatcaaaggtgctgataaggcaattcccgcggcgagtgccatcaaagacatttcaaacatcggcaaaaaagtgattgttgttggcggcagcatcatggggcttgaaaccgccgcgtgcctgacacaggccggtcggaaggtcacggtcctggaagcgcttcctaagatcctggactgcaattttatctcccaggcttacaaaacggtgataagcgatttcatagagcatctgaacattgagatcatcaccaacagcagggtgatcgaaattacagatgagggggtgatccttgcaccctgtgacgattccggggaaaaagattttattcgcgctgacagtgttgtgatgtcttttggttcgaagcaaagcaagcctcatgttccggttgactacggcaaggatattgcggtgtacgaagtcaattccattcagaattctgacgatttctataatccggtatgtcaggcattcgaggttgcatatcatttgggtcaggagcaatcggcgccaagtgcgcatatcaggtgaaggacatgaaagatttgagagatgaactgtttcaaaaaatagaacacaaaaaaatcacagcatgtctgtatacagacatggacggtgttgtctccggcatctccagtgctctgaacgaagcagaacgtataggcctcattgtggatttttctgtctctgagggaaccgatgtgctggctggagatctgcttatgcagatctccggcacacccaagcaaattgcagttgcagaggatatgatcatcggtcacatttctaagttttccggcgtcgcaacagcagcaaaggcttttgttcaaaaggcgggccatcatatgcggatcgtttgcggttcctggaagaaaatgtcctccaacataaaaaacgaactgcgcacggccatagaaactggtggagcgcatgtgcgtatatcagacgatccaatggtctatcttgataagaattatgtggctatgtttggcggaattcaagcaagtctcactgctgccgcacagttcaatgaccgcaaaaagtgcattcaggtcagagggcgttttgagaatggcgatattgttcgtgaagcatggacggcaattacagccggcgcggatatcgtctatgtggacaccggaagaattgatgatttgaggcgcattacccagagcctcaagcccgtccttcaggagatggaagcaaccgccgattaccggaaagtcgaattcgcttttggcggaggcgttcgctacggcgatctggatgcactgaaagaggccggcgcggatattgttggcgtcggacgaagcatcgtagatgctcccctgatggatctgcgtctggaagtaacgaaggcagaagaccctttgtacgcccacggtgactacgatttgctggataaaagcgaattaaaaatcgagggcattttcttgaaccagacaaatctgacggaactggcagttgttgttgcagaagaaatcggaatcaatgccgaagatgtattggtcattgatgttcgcgacggcacagttgcgttggatattctgcaaaagcgtctggatccatccaagtttattgccaaagaagaacggattcttcgccgcctgcgtgatttgaagggaattacgctttctgaagaggcccacatcagttccaatggcatgttgggctggatcgtcggcaatgatgcagatatcgaagaaggcctccaggcgatggaaatgtcgcagagtctggtgactcaaatcaaagaaagcatttccaaccgtgtgatcgtgttcccaaccggaactgaagtggaacgtggagagattgaagacaccaacacccctcttatcatgggaaaattcgctgcggcaggcttttcggttgacaagggtgaaattctgaaagacgatgtagagctgttttcccggaagctgtggcgtgctgcagaaaagggatacagcgtttcgatcaccactggcggtgtcggtgctgaaaacaaggaccacagtgtagaggcggttctgcggctggatccacaagcttgcacaccttacatagcgaagttccaggttggacatggccgccacagcaaagacggaattcgcatagcggtcggacagttagggttaacaaccttcattgccctacctggccccaatgacgaggtttccgtttgtattgacacggttgtacggggaatttccgaaggttggagtaaagagattcttgcaggtgaactggcgagaattctaaggacccgactgaaggaaaagattggggttatgatgcattatcatcataatgcgtaattgatattgtattgcaaatgttccaaaggaaaaaggaggaggaattaaattgacccatatctacagagtagcaaaagtggacaagtccaagtgtgtcggctgtaaacgatgcgagcggcgttgtcccacaggtgccatcaaggtaaaacctgcgggtgactgtaagtatgttgccccctgccaaaacacctgccctgctggcatcaatgttcctggctacgtagcccttgcgggaaagggtgactacgaaggtgcatatcgtctcatccgcagagacaatcctttcccttctgtttgcggcagagtctgcacgcatccttgcgagtccgcctgtaaccgcggcggttacgatgattcggtggcgatccgcgatgtgaagcgcttcgttgcggataaagcatatgacggcaagtttgtaaaggagcctgtatggcccaagaacggcaagcgtgtcgctatcatcggtgccggtcccagcggactgacctgcggttattatctggcacttaccggctatgaggttgatgtgtttgagtctgagagcactgccggcggcgtgctgctgttcggtattccggaatatcgcctgcccaaggaagttctggctcgagatatcaaggccattgaagaggccggtgtgaagattcatctgaacacgaaggttggcgaggatgtcaagtttgaggatctgacccgtgattatgacgctgtctacattgctaccggcacccagttctgcaaaaccgcaggtgtcatcggcgaggataaggctggtgtttatcacggtctggacttcctgaaagagatcagccacgggaatgcccccaaaatcggaaagaacgtggtggtcgttggcggcggcaacaccgcaatcgatgtttcccgcactgctgttcgtatgggcgccgaaaatgtgaccattgtttacagacgccgtgagggtgatatgcccgcagagcggcgcgaggtcattgaagctttggaagaaggcgttcagctgcagacgctggtgtctcctgtcgaaatcgttggcgacggcaaggtcgaaaagatcaagtgttcccgtatgaagatcggtgagcccgacgagcgcggccgcctcagcacccacgcaatcgagggatccgaatttgaactggaagcagacactgttatcatggcagtcagtcagtacgccgatttccccttcatcgataaggacgaagttgagctcacagagtttggcaagctggttctggatgaggagcgcatgaccaccctgcccggcgtatttgccggcggtgatgtgagccgtggttccgccactgctattgaagccattgcagacggtaagcaggctgcaattaacatcaataactatcttaaggctcccaccggcatcaatcagggtgcggagatcgaactgcctcccagagaggaatttggctggagcaatgcgctggtcagcagaatgcacaatctgccccgggaagagcgcattaagaataacaaagaggtcgctttgggccttactgaggagcaggtcaagacagagagccagcgctgctaccgctgcgtgggtaaggcaaccgtagacgaaagcatctgctatgactgcggtatgtgctgggagtattgcgaccagggtgccattaccatggagcctctgcctgagggcagaacgttgcagtatcctctgcctgataccatggagcgtgctgaagaaattctcgctatctgccgaaaggcacacttgctgcccatgcagatcatctgcaagtgcggccctaccaacacggaggaaatcgtcaacgctattctggatggcgcacgcgacatgacagatctgacactcaagagcggtaccagagctggttgcacgatgtattgcgttggccagatcagccgactttttgaggcatgcggacgtcctctggaatcccgcgaagatgataactaccatcctatcacccagactctgtgggacttctccgatgaagcactggactttgacccgatcttcaaaatgagagaaatgcagaccactctgtacagcgacgaagtgtttaatgcggctgcagatgcctacagaaaagtggtaaaggaaaggagcgagaagaaaaatggctaatgcaaaaatgtaccctgccagagtaacgcccaagtgtatgccttccgtgtatggcaatacccctgctatgcgtggatatgaactgccgggcatggtctctgtcaatgtgcgcgacttatttcccaacatgcctgaggccatttacgaaggtgatgacagcgatcccaaactggttgaactggctacccgtaaggctcttgaaaatgtcgacatgtccaaaatccatcatgatgacaccgtcaacctgattggctgcgagcacggtttctacatctttggcggcagaccctatatccagatgctgaaaaccatcaagaaggtcgtggaagagcggaccggcaactacaatgttcgcctcagatgcgtgatgtaccgcacccccatggaaggcaaagaagttgtcgaatactacaatctgatggaggaatttgagggcaacgtcgagtatgtagctgcatatgacaaggcagtccccatcaagaccagagttggtacggtttacggcctggagaagtgctacgatgccgacaagatgatttttgcggcctacgacgacccccgcgaggtctactgcagtatgtattaccgccgcgtattcaaggcatttaccatggatatggcccgctttgagacccgcaacttgtatcatcatgctttcggtaccgctatcggccatggtcctatttccaatattgtccccaccgcgatctatgactctgactacgttcagagcaagtgggtgtttggcactattttgcggacaacgcccgctggtgtttccggcattgatgcagataataacctgtatgccatcgatgaccgcatgatgatcgaaaatctgaaatggtatccttacatgcatcagctgctgatctccctcaaggattactccattgtttgcgacggctcccggtggccctactataccgctgctgccggtatcatcgccggtgtcaatactgctggctggcaggaccactacgatattgataagcgattcagcgcgctggatctcagagcgctgcccaccaatgaaggcttgaaggccattgtgtataaccagacctgggttggtatcaatgttacctggccgatgacccttcctaccatttttgtgggcaaggatcagctggacatgtggattgaggaccccaacaacagaggtatcgaaaactggaagtataccatgctggaagacaccttgcctgatgcaatcaagaaggcagcagagattgccggctccgataaggtcgtcctctacgatggcagcttcggcttcctgaattgctctcgttctgcagcagaggaactcttcgaaaacgcccccaagatccgcaagtgggtggatgaagagctgtatcccaagtacatgaaacagcgtggtcttgagattcccgattatatgaagtgattcttgcaagtttcaagcaaccagcaggcactctactatggagagtgcctgctgggaaaagtaaatgaaccaaagagaattcacgttcataaataaaggagcttcgtgtatgacttgttttgaaagagcccccgctaataagaagcgcctgaccctgattgctgtcttcgtaatgctgtttgcttctgtgctccagtccggtactgactctgtgattctggcgctggcagccgcagagatcggtggcaccgaatactatgctttggcaaaatccttttcatccgtgtctgcggctgtcctgatgcctatgtttgcctatttgggcgcaaaggatccttctcgcaagagaagcctgtttatttggtctgctttagccggtgcggtttgcatcttccttcgtgcaattgcgacgcatatggcaattattgtggcagctggcattctgcacggtatgttttcttccggtctctatgtcattggctattctatcatccgagatatttatgaccaaaagactgcagcaaagtatctgggctttgtcgttaccatgaacagcctgggcactttgatcggccctattgtttccggtgttatgattgatatgctgggttggagaattgtttgccatatcatctggatcattgctctggtcagcgcattgctcggcatggccggcgtgaaggtcaccaaggaagatgctgcggaattggctgttgaaacgggttcctttgatcttagcggtacgatttctctgagcgttttcctgggtgcgatcagcctcttcctggcactgggctcctctctgattccctttggcagcaccaccagcaatatccttttggttgtaagcctggttggtctggttgggctgattctcaccattcgtaagaagggtaacaattgcatcatccctgtgccggtgttgaaggatcggaataccctgattctgacgatcaatagtttcttgatgaatttctctctgattgccattttcttctttattccttcttacatcctttatgtgctgaatggttccgctacgcagtccggcctgaccactacactgctctctattcccggcctgttcatggggcccatttactccagaatgattgccaataagggcagtgcaaggggtgttctgacaattggcatgattcttcgcgttgtggttcatgccgcattcatcttcatcctcagtcccagtaccgacctgatggtgatctatgcgctgatgattatcgccgggttctaccagagcgcccatgtttgtacgatgaccactgcgccgcagatccagcttgcagcggacaagcgcacttatggcaatgcgatgatccaagtaaccatggcactgggttcctccatcggctctgcagtttactccatggtgattgctgccaagggtattgtggatggcttgaaggttgcctttgtgattgccatggtcgctgcgatcatcgtgctggtcatttctcagttcctggtcaagaatgaggaaaactgattaaagacacttaagctggtggcatatcatcccggttgagagacaagtgtatacttggttcccatctgtttgatggcacggtatgccacgcaggcacaaaggctctgtttcatatgtgcagggcctttgtgtcgtattccccaatcctcagctgaacgaaacaatatttgtattaaaggagaattgaatatgagtatttggaatttaaatgtgaactgtggaattacatttggagaagactctcgcttgacagttggggaaaagttgaaaagctacggagccaccaccgcgctgcttctctacgatatggccatggatcagtttggctatcaaagagagatcgaaaaagttatcaatgacgctaatatcaaagtagtttgttatcaggttgaggaaggtgaacccaccgcccagaagtctgaccgggcttatgatttcgcaaaggacaagtctgttgatgcaatcgtcgccatcggcgggggcagcaccatggacaccggcaaaatggtgggaaaactcttggcgaacggcggtaagacgcgggattatcagaataatccatgcattggaaacactgtatttcgtccgctcattgcacttccgtccactgccggtaccggagctgagttgacgccctacctgacctgtgcaacagaagacgggaaaaaaggcggtgttgccaatacgcctgttacctgtgcgatcgtcgaccctgtgttgacttataagctaccccccgtcgttacggccaacaccggtattgatgcactgtgccacgcttcagaggtgctgtgcaactgtaccagtataccgaatccttttgcagaccttgtttgtatggaggtcatccgcaccatattcaaatggttgccaattgcctatcaggacggctccaataaggaagcccgtaagtggatgtcctatgcggcaacgatgggtggtttcgcactttgcctgcgcatgatctcgtttggccacccaatcgctaaccagatttccaacacgttccatacccctcatggcgctggatgcagcattggcatgactgctttcgtacactacaatgttactgagaatcccgaatggatccggctgaacgcagagtgtcttggcatccagcaggatggcctttcctatgatgaagttgccgttcaggtcgtgaaggcttacgacgatctgcgcaaactgtgcggcatgaagaacatcaaggaattaggtgcagaagagtcctacgttgatgaaatcatcgaaaacctgaaagctgacaaaaacctggcttataatccctgtccgccgaagatggatgttttgcagaaagttcttcatgaaatctacgcattataaaatgaatgctgacaggtaaaagcacaataaaagcagaacactggaagctcttttcttagaaacattttttaatcagggtggagtgtatggaaaacaaacagcaagaacacacttatgaatcctccaatgtaatgccgtctcttggtgaacggatcagttatggtgttgcagattttggatatgcttccgcttatatgtgggtcagctcgttcatgaccatcttttttaccgattatgtcggtgttccagctgcgtctgtttcggcattgctgttggtggtgcgcatttttgatgcaattaatgatccaatcattggttccattgcagatcgtactaagtcgaaatacggacgttatagaccatgggttgccgttggcggaacagtcatgtgtcttatgattgcactgatgtttgccgtgcagccgacctggtctatgggtgttaaaattgcctggatgtggatcgtttacattgtggtcactgtagcagctacctgctatgctatgccttttaatgcccttggtggcgttattacatcaaatgacgaagggcgcgttaaactgtcaaatacccgaatggtgtgttctagcctaggttcaaactttaccaacctgattgctgcaacgctaattcttctgttatctggtacaaaccggaccagcaataccgctcagggttattttggagctgcggtatgcagtgttgtgatcagtcttccgtttatcctctggagtgcggtcaagtccaaggaacgcgtgcaaccgccacctcagcaaatggaaaagaaaagcaaaatttctctaggacttcagatgaagtgcttgttggggaataaatatgcactggggtgtatgttcggtcagtttgtagccggtttttatacctacggccgatacacaattatggcttactacttcacctattatgaaggtgattttaacctgtattccataaccggcatcatcggcttgtttaccggcattgctggttctggactactcggcccttggctgtacaaagtcattcagcataagggcagagctgtgggtaccgcatttggcctctccggtattctctccatccctatgttctggctttctgcaaaaggtgtcctgttctgggtcttctacgctgtttccacagcacttggtactgcggcatttggcctgcggtatggctgtgacggcgataacgctgactatgccgagtataagtacggtatccgtgtggatgggtttctttccgcctttatctctatgatgctgaaggctggcggtgccgtaggtcctgctgtgttgctggtttggctggattccctgggctatgtagctaatcaggctcagaatgccagtgtactcaatgcgctgaatatgggtatttctttcatccctgcagtcttgcttctccttgttgcattaaactttctgattttttatgatatggacagcaaaaagcatgcggaaattgtgaaagaattggaatgtcggcgaggaactgaaagcaaataacatataaaagcattttgtttcaccagattttcatgagaaaagattgcaaattcgaatactatacaaattaaatggatcgaggtaaatcagatgaacaaacagtttgaaggtaaggttgcatttatttctggcggaaccagcggcctcggtaaggctaccgtatatgaattggtcaagcgtggcgcacgggtcatttttgtcggcagagatgatgccaaggctcaggaagttatcaacaaatgcaaagaactgggcggcgaggctgaatataagaactgcgatattacaaagcatcaaaatgtgattgatgttttcgggtatattcgagaaagatacggaaagcttgactttgcaggcaatgttgccggtacggggattccctccacccaaattgacgataccacagacgatcagattgatatgatgatcgatatcaatttgaagggcctgatttactgcatgattgaagaaatcaagattatgcgggagcatagcttcggtcgcatcgtcaatattgcttccggtgcagcaaatattggcgctcccggcatggctgttttggcagcatccaaggcaggcgttgttggtgtaacaaaaaatgcatgctttgacgtggtcagggacggcatcactgtgaacagtatttctcctggtgccattgaaacggagttggttcagtccatcaaatatacgcatgcagaggagtataagtcatatagtaataacatgcctatcggcagatttggtatgccggaggaaattgcacatggtgtgtgcttcttctttgaggatgaatctgcctttattactggtgtgaatctgcccattgacggcggcttctgcgctggaaaaatggtgcgctaattctctgcctgtataatctcgcaactttgcaatattcccaaaagggcacgttgcaaaatagtgcctaacattgcggataggaacccgaaagggcttcctaatcgagataagggcggttagccccgtcctctcacaccgctgtacgaagggctccctatacggcagttcaatcgtatagtgcagagactcgtacctgctggatagattatagcatccggttcgtgcaagtctctcgtttgtaatagaacttgttaatgtatcctgaataatagaaaaagcgtaagtacactcaataatcacctgcaccggcgaagtatcttacaccactcatggttggagcgtttttgttttccgtagttcttgggatcgcctttgaaatgtacccggctgcaaaagtatccggaatgatgccgatggcagcactcgggtcggaatagaggcttgaaatttttggatgacatataaagtgttgtgctatgtctctaatcagatattgagcccacttctctttgataacagcgtatcaaaatgtggaattcacaaaagtaaaatacgcaagcggtgaaatctggagaagcgacacaaactaaagttcgtttagaaacgcaagagagattcttgcgtttcttggacaacataagagaatttaaaagaaagttaagaaatgccttgcgattcttctttactttttgcttggcttgtgttatcttggcccgttagtggagagtgtcgccatttggttgactatgctggataagccacacagtcctaaatagcggtttgtgacggtgtgacttaactattactgctttttattaggatgtagagatgaatgaccacacaaacagccacagacctgcgtggaatatgtggaaacggtggacttaaaaggtgctggaaatcaaatgaaacggaacggaaatgaccataaacgaacgaaaaatattataaaaagtttcaaatgtcggttgacgtgcagggggtcacaggttcgagtcctgtatcgtccaccatcgaaagttccgctttctgttgaaagcggaacttttttataattttttcacaattttcatgcgtgttatgtaaccttattttatccctgaccactcaaccagccacagtcaggaaaaatacgggcctccgagagcagttcgccctgggaggcccgtttgttcaacctgccagttctgcctgcttccgccgctttttctcggcggcgatctccgcgatcagccgggccaacttctccttgcacaccgcctctgtatggacggagacgttggtgccattcgtttcccgttcactttcggggagtagagaggctgggacgctccagttcccagaagaaccgctggtgcagggccttcatgtagtcgttcatacgtgtcgcctcccttgttcagcaacacaacatatcacagaaacagagaatagccagggctccggcgcaccggcccgcggactccgctttcttccaggagactaatagcggaacccgtaatcgtcttatttctcagacgcctgcactcggctctccgctcccccactcacctccagaaatgcgcagagggactgcttgcttatcgtgtaatacttgggcgggtccaagaacagaaacagaatccggatggcagtctcctcgccggtgtcggcatccatggccgcaggaatcccatcgatagttttccatcgcaccgctggtagtacccggtatagtcccgcccgcccagcataccctctcccattccatgttctgctttcagtatagtggggtaaggagcatctgcaaagcattcacatctcatcatctgattttatgggtaagtgtgagcagaggggcgaccgtttggctgcccctctgtttcacgtttacattactgcacttctgatgaatatttatagtgccccacagagcaacttgcagtcctgagaaagaaaacttatggtgtcaggaaactggctcccgtgtatagccagttgacgcatacagacgtacgggcaccgcctcgggaagaaaagattcggatctcacacatggaccaaagaccggtagagggctcttgttgccggattcgtgtccagtgcatctcctgagactggctgtagatcagatcatccactacgaacacacctgagattgtcaggttgtcattggtctggctgtcaatagaagctccatcgtaaatacttgcgcggcgaatatcggccacaatagacgttcctgttaccgcaggctggagggaaaagcggagtgaagtggccgaagtgttctgcaaggtcatgttcagcgcctccagaggaaccgtcaagacacttccagcagaggacagatttgcgttgtaaacctccggaacagcttttagattgggagtcaggaaatctgtctccgcagttttaaaccgaaccttgtagacagtaggtatattttgctccactgtaatttcaggagtctacccagggatgccctgcggtccttcgggtccaacttcaccaggttcacctttcggcccctcggggccaacgggaaccacaaagtccagggagatcccggtgtctgtcggattggcggtgacggctgcggcagtaccagaggagacagttcccacagtgacggtaggtgtcgtgcccgcgggtccctgagggccaagttcaccctgaggcccggtttcgccccgctcgccctgaggcccttccgggccctggggacctgtcgggccggattctccctgagggcctgcaggaccgacgggaaccacgaagtccagggagatcccggtgtccgtcggattggcggtgacggctgcggtagtaccggaggagacagttcctacagtgacggtaggcgttgtgcccgcgggtccctgagggccaagttcaccctgaggcccttccgggccctgaggacctgtcgggccggattctccctgagggcctgcaggaccgacgggaaccacgaagtccagggagatcccggtgtccgtcggattggcggtgacggctgcggtagtaccggaggagacagttcctacagtgacggtaggcgttgtgcccgcgggtccctgagggccaagttcaccctgagggccggtttcaccccgctcaccctggggtcctgccggaccttggggacctgtcaggccggattctccctgagggcctgcagggccgacgggaaccacgaagtccagggagatcccggtgtccgtcggattggcggtgacggctgcggcagtaccggaggagacagttcccacagtgacggtaggtgtcgtgcccgcaggtccctgagggccggtttcgccccgctcgccctgaggcccttccgggccctggggacctgtcgggccggattctccctgagggcctgcagggccgacgggaaccacgaagtccagggagatcccggtgtccgtcggattggcggtgacggttgcggcagtaccggaggagacagttcccacagtgacggtaggtgtcgtgcccgcgggtccctgagggccaggttcaccctgagggccggtttcaccccgctcaccctggggtcctgccggaccttgagggccgctttcgccacgctcgccttggggccctgccggaccgatggggccctgttctccctgtggtccgggacagccgcgatctccttggagtccttgagggccggtctcaccaggaagcccttgctcaccctgaggtccctgttctccttgagggccgcggtcgcccggaatgcctctttccccctggggccgactgggccagccggtcccggatcacccttaggccctacggggccgcggtcgcctttggggcccatggggccgggatccccgcggacaccctgcggtccgatatctcctgtgtctccttttggccccatatcgccccgaataccctgaggccccgggagtccctgagggcccaccattccttttgggcccatgggaccgggacagccctgctcaccctttggcccctggggaccacgctctccgcgggggccgcgttcaccctggggcccgcgttcgccctgcggcccacgttcaccttgggggccgcgttcaccggagagaatggggcaaaaacactgacaggaggagtctctgtcaggtgcagagccgcaatgacgttctttatttaaattgttgttgggaaaataattcatctcattgacctctcatccaaagtaagggaactgtggttatagctaaagttgcttcttgtctgtgtccttctcgatcttttcattcaggcgctgactctgtgtgccgaaatagaatgcgatgacaactgaaaaaattgttaaaaaatcttggttggaaattcgatccaaaacagcgagataggcaaatactaccgtcaagacaagcgttacaatgcttttaacacacagaaggttgctgaatttcttcaagagagcagacattacaatcgttcctttctcataaggcctatgctcatggtatgctatgcacatggtggggctgaagtgtgtggttttgcttcagggaaattcgtctgcatatagtcgtccatcactctaaacggcatttccatggcaatctaactgctggaaaattcggcatttcggggcaaagagagacatctgcctgtccagggctgaaaaacgagcccgcttttcagcaggctcgcttaatggaaccattctcccttcaatgttctgtgagtatccggtgcactctccggcagaagtttctccgcctcctctttgtcctccagttcggctggtattcatacagcacgacagggtgttccacatccctgcggtccggtacagccgcatatagcatttgctccggatagtccggccctccagcttcaaaacttgcggagctgccagggattcgggcagtcttcttttcagctttcaagatgggcatttccgtttctgccgtgtgcaattttgacaagcgtatgtatgcccgaatcctcacctgtgtggggatcatgactcatgtccgccggacttttctgccaatcccctccatgggcgatccggagcatacacgcccagattcagaaagccggtgctccatcatctcaatagtgacattttcgggcggaagctcctccacttgtagggaccgctcctgccggatatggggctctgccgcggttccccttatagcagctctgacagacaaccatgcctccgtctcatcaagcatcgggctcagttgacccgccaattcctctttcatctgttcagagaatgcccacaggctttcttttggcaagacgcacctgttccatcagccattccggcttccggtttcgttccgtataccccgcgctctttcgaagcagttcatcctattccgcacgggagagcgttaccatctccgtgctgttcatctgtgtattggtcttgtttttgcaaatttggtggctaaaaattacctggaaagttgtcattttcaatgcttttgacaattaaggatactgctggtaacttaacctccgagcctctgcgctgttccgaggccactggaagcttccagcctccaaccgcttcgtgaccagtacaaatccatcctcttcccaataaagcctcttgttccagtcctgcctataaccacagaacaaaaacagcgtaccgctgaacggagctaaacggaacttctgctgtaccaatgtcgcaaagccgcatacccacaggcaatataaatctgccctgctcccgcaaggtcattcagcatccctcagcccccagcacaacgctgcctcggccgcgctgtctgctcggatgtaaatccccacttcaactgctccggttttaatcccggcaatcaccttgcctcggctcccacgcaattccgaggcggtaatttccgcgaataccggcgctgcttccggcatccgcccctctttctgcctgttttggttttcgctgtttatgccgtacagctcccgctctcaccgctggtatatctttgggccgacaccgtgttccaagcaccattcacttactcgtctccccctgtttcggcaaccttctatctgcttcttccacgtttcaagccgcgcctcatgtcaggctgctctcattgccatttgattcacctacttctgtttatccgtccttctttattatattgcgcctgggcaatccgcttttctatttggcacttgtttttatggcgcttagaagccgtagcgatatccacttttctatcgtaatacagaaagcccgggcggaaaaaatctgcccgggctttctgtcaaattgatttttgagttccttactcgtaccggctccagtcgggagcacggttcaggtcggtccagctctcatagacccggtccttggtgacaaagtcgtgggagttggtggcctcctggatggctaggtagaaccagtcgctctcgtggcagtcggtccaggtgttcatgccggagagcagatcgtccgtgtcctccggcaggcggcacagcacccggttgatcatggtcaccgcctgggcgcgggagatgtactggtcgggccggaaggagtcgtcgctgtatccctggatccagcccagcgccgcggcgcggctgatctcgtcctccgcccagtggtcggcggtgtccgtaaaggtggtgacgccggcgacgccgctgtcgtcgaaccgggcgcagatggccgcgaattcggcgcgggtgatgttagcgtcggggtcgaacaggccggagttgcggccgttgatgacgcccagccgggccatggtggagatggccgtgttggcccagtagtcctcgttcacatccgggaaggcgttggacgtggtgagattgtcgtcccgcacattctcgtccagcaggcggaagaagatggtggccacctgggcccgggtgatattggcgttgggccgcacagagccgtcagaatagccctggatgtaggcgtagtggtcgtcgccgttcagcatgccgggcacggaggtctccgtccagccggcgaacagcgtcacggaggaggtcacccgcagagtctcatcctcgtccacccgtatggtcaggcggctgtccttgtaccaaccggtaaaacggtagccgggccgggtggggatgtgggcgccgtactcctcatcatcgtacacattgagggagaagctccttccgtcttcatcgatggggtcgaagcgggtgccgccattggagtcgaacctcagatagggatcgctgtcatggccgccaccgtctccggagctatcgcgggcaaaggttgcagaaatggtgtggtttgcattaacatccgtaaatgtatagctatcgactgctcctacgctcttttcatccactttcacattggcgatggtatagccgccgttcggcgtgatggtgaaaatcttgtccgcaccctcggccacagcaacgctgccgcgggggctgatggagccgccgtcaccggcggaggcggtgatagtgaaggtctgcgcgttctcctgccagacaacagcgaaaggagagaatccggaacggtccacatcaaattcgataccattggcgtcaaattcagcggttataacctccggctcacaggcttcaatggcatccgtcacctcggcctgaccggcaatgccatattcccggtgcaggcccggaaagtggatgacctgtacatccaggtcatttgcgttatccattgtcacaccgtcgggatatggcaaatagattgtggtgccatagctggcagaaacccaggcgttgccgttgtaggcgtccaccagatccaggtagtgaaagtcgtagcggtaggttttgccatcggacaactcattcagaagatcagaatcctctgccttttgttccagcagagcctggcggtccgtgccgtcatcatcaatcagcagcgagtcatccaggagttggataccggcgatatcctcgatctcaaagtcttcgttatcgttggtgtagaaagacggctgatacacggttccccatgagctggtttgtgtctttgcaatcgcctcggcgtggatcacagccttggtgggctctgcggtcaacaacacatatgtattggcgccgtcctgcgcttcctcaatatcctgcgtatggcggacgattagtgtacccgcaccgtcaaggtttacattgttgccattcacccgaacgtcctcattggtaagtccgttcttccatttgagggtaactgtgtacacgcccggcttggaatcatctgtggcgacagtgccgtcctcataggtatagaccgcctcaatgttttcaaggagctgatcgagcatggtcttgtcgtccgttgccgggatagtcacacccttgatttccaaacttgtaatgtcgccggtgtattttacgtcaacactgccattgatggtgagcttggggaaaccgccgtcgtcatagttctcctcgccctgaccgccgccggtgtagatggtgatgtcatcgggggccagggtatactccttgttgttgaagagcatcaccgcatacggagcacctgccgtcagatccttcaaagcgatgggcaccttctccgcattctccacctcttcgaccgccacttcagccccatcaatgggtgaaccgtccggattgacctgtacataggccacatagaggtcggtcttcttaggggaggaagtaggatcgagctcgaagctgtactcagtcgcagacggctgaacccacagggcgctgctgcccacgggggtccagtcggcgtgctcgttagcaacgccagctttcagcgtgttgactgcctcattcgtggcgcggcccaggttcacatccgcatagccctcaggaagttccaccttcccggcgctgacgtatatggtacggggttcccccatcacatcagcgcttacatgggtgtactcatatccggcgccttcctccgtttcagcaacagcataaccgccggaggaggagatttgtctgccactcgatcccttattgccggaaatggtgccgccattgatctcgacgagggacttccctgcaacggtatggtagataccatagctgccgttgtcgcagattttgccgccgttcataatgaacctgacacccgtccagtcggtcttgccgctgatctggataccgtagctcgagttgcgggcaatctcaccgccgttcatggtgagattggagctgttgttcacacgaacggcaagacccttgttgtccacaatatgggcagtctcctcaatcgtggcgatgacaccgccgccaccctggttggcaagataaatcatgcctttagaggcggtattgtcgcggatggtgcccgcaaatgtgtagtgggagccgttattggaatagatcaggccgcccgcactgctggaactacagttttcaatcacgctgttcgggccaaatgtgatctggccgtaccaggaccgcaaaagactcgccgaacccgaagcgcattctgagatcgtaccgttgaggtacacctcatggctgtagttgttgttgtcgaggtcgtcaaaatagagcagctggaaaccgtccacatgagaaatcttagatcccgctttagtggtaaagttgcaaaattgggtccagatggcgcagttattgcctgcgttggtgccggtcacattggtgatctctccagtgctggcaagggtagcttcaccgtgagaccgcagatggacagcaacaccgttctgcccctgccaggccgcatcggtaccatgaatattttgaatggtgccgccgatgttagcggtgccgccgtctgcatagagtgcacgcccattcatcatgacacctttatcgccgcctatcgtgccgccgttcatggtcaagatgccgccctggagccagaccgcaccagcggggccaaagctgccggacgcacctttctcacgttcgttttcggttgtatccaaaatggcgctgccttcttccatgatcagctcgccaccggacaggcgcacggcactcataccgccgtagttgcgaagttccgcaccatcccccaaagtaatcgtacccataccgttgtaagttgcgattatggcgtcttgcacaatgcttgtatttgggacctcactcctgctaacggtggtctccccatcgccttcggaatcggcctgcacaaagtattcaccttcgtatttgcccatatcatccaaaatgatgtgggtcaaaataagagacgaaacggtcccttgttccgtttccccgcctacttcgatcatcgcggggttgtagtgctgtctggcgggatctgcgttggtatgaaaattttctccgcgggagagcgtcacaggatcaacaccatagctggtgatggtcagctctttctcccagacccatgccatttggttcatttccacatctgacatgacataaatcgtcgcaccatccggggctgcttccgccgcctttgccaaggtggcatatggagcgtctgctgtgccagtgccgtccgcatcatcgcctgctgccgacacatacaccgcgttctcagccacaggctcttctaccactgtccccggatcctcagcaggctctatgggatccagctctcccgcaggctccgtgggggccgtgggatccggaccctgagggggatctcccggaacctctgtcggctcattttcctctggatcccctgaagtccccggctcatttggcgcactggggccatccggttcatcggcggtcccactttccacggcctcctgtttcccgccttcctctgcggggtctttccgcaagtccgatccatcctgattgatcgcaggatccgactcgccagtcccctcctctgccgccagtgtcgaaaccggcagcagtgtcagcagcaggcacagcaccatcaaagctgataagatccgtttcttcatctcttctcctcctttacacctctcggcgagaaaatatctatcgcaaacatccttttggatggaattgctctcattctccgtccatccggcagccaactgctccgtatccagaatctgctcataggcttgctccgccgggagccgcacgttccgctcgatctccgaccgggtggccagatacaacttccgcaggcaccaggggttgcacttggcctcctccacccgcttgtcagacggcaggtagtgatagaaggcccgcagcttggcaccgtacatctgcaccgtgttccggctcctcccccggcgggagagtgtctccagataggaccggatcatctctgatgtgatgacagcgccagtctgctccccagtctctggcagcctggctgcctccgcgcactgcatattcacaccccctgtcaacggaattcgcattccatcccgcgcccgaccaagctggcgcaagaagctccgcagaacaagtgcgaaaaaagcccgtgcggctggcacgggcgtaaaaaatggcgcagggaccaaggccggacaaaatttgacatttttccggcttttttctgctgcccaaagcggcaaaatcccttgcggttagctgtcctttgtgctaaaatttgtctattgatatgtaggacgaactattttttcacgatcatttgtgtcggaatgcgaattccgtgattaggagatcagtcccagccggtccagcgtccgctggtgttctgcgccagaggtcaccaggtagatgcgggtggtctcgatgctgctgtggcccagcaggtccgccagcttgacgatgtcccggctggtccggtagaacaccatagcaaacaggtgccgcagattgtgggggaacaccttgcgcgggtccaccccggcgcgcccgcacagccgcttcatctccgcccagatctgccggcggcccagctcttttccgcttttggtgcgaaagattgcaccggaggcggttttttgtttttgggcgtattggagcagcttccggcagagcttttccggcaataggatggtgcggatcttgcccttgagggagatctcggccttgccctgccgggcggcctccaccgtgagataccgcacctcgctgacccggatgcccgtggcccccatggcttccaccagcaggcccagccgctcctgtcccagccggtgcgccgtgtccagcaggcgctggtactccgccttcgtcagttcccggccggcgtcccggaacagtcgccgctggaccctcaggaatttcacccggcagccgccgaggcccaggaactccagcaggctgttcagtgcggagagcttggcgttgatgctggcgggggcgtagccccgctccaccagatgagccttccacgccgcgctcaaccctttgctgatctcccgcccgtccagccagcgtgcgaaggcccggatgtcccggagatacttctccatagtggcttcgctcttctcctccagccggaggtggcgggcaaatgcctggatttgcaggggagtcagtctgtcttcggtcataagatgcctccttttgtgatttcacaacgatattttaccggatgtgcaaatataacaaggcccacagcggcagctgccgctgtgggccttgttattttagtgccgtaatcgtaagattttctccagttccaaaaagctatacgcggatctgccagtttttctatgaagggacgcgcctcctcccgttttacggcgaacatgataccagaggccgtaccggaagtcggtatgtagaaaaacgtatatgcaagttcttgattccgcaaaggttctatctttcaataccatctcaaacggctcagatagtgcatgtctgtattccttccggaacagcggcatggaattccataccgctgtcgttctaaaaatacttctctttttctgtcagggtctcatttccgatgatattctctaaactgtcccatttttagctgatagcttcgattcccgcccctggtcacgatggccccctgaaatcagatcattcagataatctcttgtacagggcggcttcaggccaatagactctgcagtttccgatgctttgcttcggaatgatcggccaggtatgtcatgatggtctcttccacccttactcttatcgctgtttttcttaaggaagagctccagcagagtccactccggctcaaaccgctctgtgattacaggcgccatacgtaaaagatattgcgatgccactgccggcatgttcgccgacatcaatgaggctgcatattttcagtatcgtcccattgcgggaatcgaagacgccaccgctctttgcctcattgatttccatgcgaacactactggggttcgccatggtgatggcgtcccattctttgatgaccactccgagtcccggcagctcgcttcgggagcccttgattcccctgagaaacatactgtcaaggcccggcggatgttgcgccgcaaaggcaatggcaatatcataccgcagaaatttgaatcgtttttcccggttctattgcagaaaatcgccgcaccggacagcgacaaagccggaaaagcccccgaaaacgcggaatgctttttccttttgagtggagcgattgtttcttgacggtttcttttgtgaaaggctttcaattttcacagcttctttccaagaattcggatatcttttccactttttatagaattcgttgaaaatactttacaggatacacgcttttttgatatgataaaaaagtaacaaatcagaagtactatgctcatttctgggagctcatctctacgccgcatcaatcccaggatcggaggaaaatcggatgaaaaaatttttaacagcgattttagtcgcagcagctcttttcacaactgtcggctgcagcggccggcccgccacgacagcggatgttctccagagttccgcggatgcggaggaaggttcgtcccatgacagccagggcagcctccgcaccggcctctatgcggtgggctccctatcctccagcgccagtgcgggagaggaggacggtctgatccaaacggatgtgacgatcgtcgccgtcaccgtggatgagacgggcgtcatcactgactgcgtgatcgacgccgtacaggcaaaggcaaattttgacagccagggccagctcctcacggatctcaccgtcccggtgcccagcaaaaatgaactgggcgctgattacggcatgggcagcatcagcggcatcggaaaagagtggaacgagcaggcccaggctctggcggactatgtagtgggcaagacggccgatgaggtgctgggcattgccgtggatgaggccaccaagcccgcagaggcggacctggcctccagcgtcaccatctccatcggcggcttccagaacgccatcgcggaggcggtggaccgcgcccagccgctgggcgctcaggccggagatgagctgcggctggtgaccagcaattccatggccgccggcaatgcaccagagggcgccgccggcatggtggagaccaatgtgaacatcgccgccgtgaccatgaacggagatgccatcacctcctgcgtgatcgacgccgtgcaggcccaggtcagctttgacggccagggacagctcctcacggatctctccgccccggtgcccagcaagaatgaccggggagcggactacggcatgggcgccgtcagcagcatcggcaaggagtggaatgaacaggcggcggcctttgccgcctatgtcaccggcaagaccctggacgaggtggcgggcatcgcggtggatgaggccaccaagcccgcagaggcggacctggcctccagcgtcaccatctccatcggcggcttccaggccctgctggaaaaactccggtgaggctccggctgctgtccctgctgctcccctgcctccttctgaccgcctgcgccgctccggaggaggtggagacgaggcccaagcaatatcaggcgacctttctggacgtgttcgatacagtgaccacggtcatgggctatgcggagagccaggaggtctttacagagacggcggagatggctcacgatctgctgctggaataccaccagctctacgacatttacaacgactatgaggggatccacaacctcaagaccgtcaatgaccaggcggggatcgccccggtgacggtggatgcgcggatcctggatctgctgctcctgtgccgggacctgtatgcggacagcggcggcaaggtgaatgccgccatggggagcgtccttctgctgtggcacgaggcccgtgaggcgtccgtcaacgacccggagcatgcctatctcccagaggaggatgctatccaggccgcgttggagcatacctcctttgacaatgtcgtgctggatgaagcggcctccacggtgtatctgacggacccggcacagcgcctggacgtgggggctgtcgccaaggggtacgccgccggtgccgtggccgccgcactgccgacgggcatggtactgagtttgggcggcaacgtctgcgttacgggccccaaacccgacggcagcccctgggtgatcggcgtccagaaccctgatggggacgacacggagtatgtccagcgcctggatatcaccagcggcgcggtggtcaccagcggggactatcaacggtattacacggtggacggcgtcgcctaccaccatatcatagacccggataccggctggcccgcccggcattaccggtccgtgacggtcatctgcgcggactcggggctggcagacgccctctccacggcggcattcatcatggatgaggagagcggccggatcctgctggagacgtatggcgcagaggcgttgtgggtctacgcagacggctccgcctcctggacggggggctgtgacgcctattttcattcataaacggaacatgaggagaggtgagatcatatgctgcgaaagcaaaccttctggggtggcgtccaccccgcggggcgcaaggagctgtccagcggagcaccgctggaggactgcccgccgccgcgggaggtggtcattccgctgctccagcatatcggaaagccctgcacgcccctggtaaaggccggggaccatgtggacatggggcagaagatcggtgacggcgagggactgtgcgtccctgttcacgcctcggtgtcaggcaccgtgaaggccgtggagccccggagccaccccagcggccagccccatctggctgtggtgatcgagaacgactttcagaacacctaccacagcgcggtcccgccctgcgccgacacggatgccctggacgccgacgccttgatccgccgcattcgggaggccgggctggtgggcatgggcggcgccacgttccccaccgatatcaaggcgaacatcgggaaggtggagaccctgatcgccaacgcctgtgagtgtgagccctatatcacggcggatgacgccctactctgcacggatgcggaccaggcgattcgcggactgcggctgctgcggcagctgctgaagccccggcggacagtgatcgccattgaggacaacaaggagcgggccgtttcgatcctgacggacaagctgaagcagcaggacgaggtggaactggtcgtgctgcccacccgctacccccagggggcggagaagcagctcatccaggcagtcaccggccgccaggtcccctccggcggatttcccaaggatgtggggtgtgcggtcttcaacatcgccacctgcgccagcgtatgccgggccgtggcggacggggagcccatcctccgccggatcgtcacgatcaccggccacgggatcaaggagccgaaaaacctgatcgtccccatcgggacgcctttcgcccacgctatcgaggcggcgggcggcctgcagggggatgtgtggaaggtcatcgccggaggccccatgatgggccgttcccaggcggatctctccacgccggtaatcaagggcaccaacgccattgtggcgctgaccagcgccgatgacctggagtctccccacccctcctgcatccgctgcggcaggtgcgtgtccgtctgcccgatggggctccagccgctgtacctctatcgcttctcccgctgccgggatgtgggaatgcttcggcaatacagcattctggactgcgtggagtgcggctgctgcgcctacacttgcccggggaagctgcccatcgtggcggcgatccgggagggaaaacagcgggtaagggaggaaccatcatgaggtttgccatgtcttcatccccgcatatccgctgcggcgacaacacccggcggatcatgctggacgttttgatcgcgctgctgcccaccctcctggcgggaacgatcttcttcgggctccgctgcctgctgcttgcggcggtatccattgcggccgcaggattggccgaggcgctctggaacaagcttacccgccggtaccagaccgtggaagatctctcggccgccgtcacggggctgctgctggcgctgacgctcccggccaccgtgccctattggatggcggcggtgggtgcggtgtttgccgtcattgtagtgaaggctgccttcggtggcctgggccagaacattttcaatcccgcgctagcggcccgcgccctgctgctgttgctgtttcccgcgtccatgacccgtttcgcggcccctggggcatccgttcccctggacctgggctccgcagacgtggtcacagccgccacgcccctccacagcatggtgatgcccgcgctgccggacgtcccgctttcggagatgttcctgggcagcatcggtgggtgtatcggtgaggtctccgcgctggcgctgctgatcgggggcggatatctggtggtccgcggggtcatcaagctgcggatccccgtcagctatctcggaacgatggcggtcctgagcttcgccttcgcaccgatggaaccgcttcggtggatgctgtacagtcttctgggcggcggggtcctgctgggggccctcttcatggcatcggactacgccacctcccccgccacgcccggcgggcaggtgctctatgggatcggctgcggcgtgctgaccgtgctcttccgctccgtcggtctctacccggagggcgtcacctacgcgattttactgatgaatgccgcgtcctggctgctggagcgcttcacgcccacccgcctgttcggcgcgccgcaacggaaaggaggccttcgatgaaggcaaaagagctgcttgtcagtgccggttccctgctgcttgccggcctgatcctggtagtggctgggaatgccgtggctcccgccgcggccgcaaacgccgcagcggagcaacaggagatgatggagaccctgcttcccggaagcacggtcttcaccccggaagaggacacggggaccgatgccaatattacggccgtctggaaaggggaaggcggctggatcatagagaccactgtggacggctatgccggccccatccgccagtggaccggtgtggacagcaatggccatgtaacaggtctggtggtccgggacatggaggagaccttcggcctgggccggaacgcattgacggacattgattttctggtgcagttcgtcggcacctccggagaggcggaggtgggcggtggtgtggacgcgatcaccggcgccaccgtcacctcgcgggcggttgcccgtggcgtcagttccgcctgcgcgtatgtcaccggtgcagatgtcagcacgtctgcgacagagtggggaggttgatgctgcttgaaaaagatcattgtatcgccgctgtgcacggcgtccatctgcctttccgtgaccttgctggcagcgggtcttgccgcccagattgcagcggcgctggtccccaacatcatcctgcccgcgctggacattcccacgctggcggccctctctctcctcgcgctggtcctggaggtgatcctctttggggagaaccaccggttttgggcaacctcgctgatcgtgggcactgtggcgttcggcgtgctctctctgtgcgccggcagtgtgccgacggtgctggacgcgctgcgggtcgggatcctgggcggcgctgtgttcctgatctgtgaggtactgctccactccatcctggaccggatctcctccggtgccgcgggcaagtaccccaggagcatggctgtggtgtccgcgctgctgctgtggcttgctgcacagattctgatgagtattgggatttaaaactgcggtcggggttcccatacggcagggcagcgagctgcgtggatcggttcgccggtacagtccagctgttctgcaagcccggactatccgttccggtaccggttgtatgcggagcaccggaaggccgaagccgcctgaaaaaccctccatcgctaaaaaacaagggcctccggcaagatgccggaggcctttttcatatccccgagaactgccgtgagctgtgaaaacatcggaccgcagcgaaggattgggcggcaacgtgatcccgcaagctgtgtgttcttgtcaataccgttgcaaacgcggctttgacgcaagccgtttcagctgccggcaggcatttggggatggtagtccattttcccgtggagaccccaccgagtcttccgcacctctgtcccatttacacagggatcaccggcaagcagggatttcaatgcgcctccccgggtggggaaggtctcagtgctccagcagggtgagtcgtttcagaatatgtccgatgtccgcagggatgcagacagaccgcccccgaatctccgggggaatataggactccttctgattgatacaggcataggcagcgctccggttctccagggtcatcttccagaagggatacttgatgatgcccggggtgttgccgcccacccccagctccaggaacagcagccgccgtcccctgtgccgccgtaggaagtcctcgtaccgccgggcggcggcataccagcccgcatcctggacgaaggtatcgtcgcaccgcaggttcatggccatgggacggccgcacctggggcagcgtggcaccagctccgtggggatccgcatgtccctctgttctgcaaacattttgcggacggtctcctcgttgtcataggtctcctgatggcagggcttggagcactgccacaggccatagtcccctgggtgtagaacagccgctgcttgtcgaagcccgccagctggaactggtggtccacattggtggtcaggacaaagtagtccttgtcctttatcagcttcagcagatcgccatatacaggcttcggcgccttttcatagcggtttaccaggatctgccggctccaccaggcccagtactcctccaggctttcaaaaggatagaatccgccggagtacatgtcctggatgtcgtacctggactgaaagtcgctgaaataccgccggaaccgttcgccggagtaggtcatccccgcagaggcggacagacccgcccccgccccgaccaccactgcgtccgcagaggccagggcccccttcagctgctcaatcgggtccgaggagacggcggtagatggctgcgtccaggtctttgaaaacattgaagatcaccctttctacggaagttgtctgctgctccagaaattcccggaccgttctcacggcgatctcggcggcctcctggtttggaaagtggaactccccggtggagatgcagcagaaggccacactgcggagaccatgctccgcggccagcgccaggcaggagcggtagcaggcggccagctcccgccggtccttccaggtcacccatctgcccacgatgggccccacagtgtggagcacataccgggccggcaggttataggcacgtgtcagcttggcccggccggcgggctcaggatgcccctgggcccgcatgatttctgcgcacgcgtcccggagctggagccccgccgccgagtggatggcgttgtcgatgcagccgtggcagggggcgaagcagcccagcagagcggaattatctgcatccacaatggcgtccgcccgcagccgggtgatgtccccctgccagagcaccaggcggggatctcctgcagtgggaggcagggcatccccgttcaccacgcccttttcctcccgctcggcggagagcagggcatcctggacttccagaaatttgggggccaggggcatgggcggccggacattcatcagggagcggagcagccgccgctgtgagaatgcatccaccggaaatgcttccgcctgctcccggtactgaggcatttccgccagaagggtttgattcaaatattgtacctgttccctgcgatccatgggtctcctccaaaggaaagattcattgtacggtctgataccggaaatgccagagcggagatcggcacagagcccgcttcccggcacttgcagagggcgtccccttctgcgggaaagcgcaggctgcttcacccctcgctttctattgtacggcgggattcaccactcgtaaagtacgcacaatgctgtgacataggcaccgggaggtaaccaaggggctgcggggctttccacggggcgaaatttttcatcgccgccccatgggagcttgacaatcgctctgcaggtaccataaaatatggatgatatcagaggatttgaagtgatcggtatacaggagggacctgcagatggcagccgcggcaaaagaacttccggcctgtccggtggaaaccacgctgacgctgatcagtgacaagtggaaggtgctcattctccgggatctgatgccggggacaaagcgttttggagaattgaagaagtccatcggctcggtcagccagaaagtgctgacggcccagctccgggagatggagcggagcggcctgctgacccgtacggtctatccggaggtcccgccccgcgtggaatacacgctgaccgacctggggtacagcctgaaacccattctggacgccatgaggaactggggcgaggcgtataaggcccaaaaacaggggtagccctccctcagcgtcaagccgcctgctttggcagcctttgcggggcggtcccgaaagagccccgacccagcaaaaaacagactgctcgtgcagtctgttttttggatcccgccgtcccgcagcggcagggcccgcaagggtgcaggcttcctcaaaggggaaacgactccattaccagagtcaggagcgggatcgtcaggatcgaacacagggtggaggcaaacgcgatctgcgaggcaaagacggcgtcgcagtcatacttgtccgccagaatagagcccgtgctgccggcgggcatccccgtcatcaggatacagacattggtcagcgtcgtgtccaggtggagcggtttgagcagtacgcacagcagaagcgggtacaggaccagccgcaggcaggtgtaccacagaacaggctttgagaacatggagcggatgggggcgtccgccaggattgtcccgatgacgaacatggagaccgggacggtgcagctgctgaccgaggcgacggcgctgtccaggaagcccggcagggacaccggagcggccatcaggagcagccccgcgaaaacggcgatgatgcaggggtggcggaccagcttgcggaaggcgtccttcctgctgacgctggtgaagagggacagccccgccgtccacatggtgaagcggagcgggatctggaacatggacgtgtagatcacgcccagatccccaaacagcaggcgggccaccggcaaccccacaaagctggagttggaacagatgatgccgtaggagagaacgctcctctgctcccgagggtactttcggaagagcagcttgctgccgtatatggacatcagctggatgactgcggaaagtccaaccgccagcaggcagttccgggcgaagccgtctgggaacaccatcccgcctaaaaaggactcgacgatattgcagggcaggatcacatcgatcagcaggtcggagagcatcttccgccccgccgcgtcgatgatcttcagctttttgatgagtacgcccgtcaggatcagaaggaacatcgtctcctgcagggacagcatctcccagaaaaactccatccgcacgcctcctgtccggtcccccgcaggccccggtctgcattgttattcattatataccacccagacgggattgcaagcgccggacacttctgtgcttttgtcacagaaatcccggtcggcgtgtggtatactctttttaaaagagccgccggacggcccggctcccggtgccgggagccccgccgcagcagcggcgcggacagaaaggatgcgtatgatgggattctttggatttctgcagcggccggacctgggacaggggctggagcggtttgccgccacgccgaacgccctgctgctggacgtgcgcacacaggaggaatatgcggacggtcatattccggagagccggaatctgccgctgcagacgttggggcggacagagcttctgccccccgcccgggagacgcccctcttcgtctactgtctcagcggcgtcaggagccgtcaggcggccggcctgctgcggcgcatggggtatactgatgtgacggatctgggcggcatctgcaactatcgtggaaaggtggtcaagtgagatgaaagtcatcattgtaggcggcgtggccggaggcgccaccgccgcggcccggctccgccggctggacgagaccgcggaaatcgtggtatttgagcggtccggatatgtatcctacgccaactgtggtctgccctattacatcggcggcgtcatcaccgacaaagaggagctgacgcttcagacgccggagagcttctggcagcgtttccgggtggacatgcgggtgcgccacgaagtcacagccatccacccggcagagaagaccgtggacgtgcggaatctcgctaccggcgagacctttaccgaatcctatgacaaactggtcctctcccccggtgcccggcccacccagccggcgctgcccggcgtagggatcgaccgcctgttcaccctccgcacggtagaggacaccctgaagatccgggaattcatcgaacagcaccatccccggtccgcggtgctggccggcggcggcttcatcggcgtggagctgatggaaaacctgcgggagctgggcatcgacgtcaccgtggtccagcggccccgccagctgctgaatcccctggacgcggacatggccgccttcctccacgccaagctgcggcaaaaaggggtgcggctgcatctgggctgcactgtggagggctttgccgccaacggtgaccgggtcaatgtgctgctgaagaacgaggcgcccctcaccgccgacatggtggtgctggccatcggcgtcacgccggacaccggcctcgccaaggcggccgggctggagctggggatcaagggcagcatcctggtgaacgaccggatggagacctccgcgccggacatctacgctgtgggggatgcggtacaggtgaagcacttcgtcaccgggcaggacaccctcctctccctggcgggccccgccaacaagcaggggcgcatcgcggcggacaacatctgcggcggagacagccggtatcccggctcccagggcagctccgtcatcaaggtattcgatatgaccatcgccaccaccggcgtcaatgagaagacggcaaaacaggcgggcatcgactgcgacaaggtctacctctcccccatgagtcacgccggatactatcccggcggcaaagtcatgaccttgaaggtggtgttcgagaagggcacataccgcctgctgggcgcgcagatcgtgggttacgagggtgtggacaagcggatcgacgtgctggccacggccatccatgcgggactctccgccctccagctgaaggatctggatctggcctacgcgccgccctactcctccgccaaggatccggtgaacatggcaggctttatgatcgagaacctgtcccatgggctggtggagcagttcttcccggaggatgtggacgccctgccccgggacggcagtgtgacgctgctggacgtgcggacccccggcgagtacgccgacggccacgcggagggctttgttaacctcccggtggatgacctgcgggagcggctgcgggaagtcccggtaggcaagccggtgtacgttatctgccagagcggcctgcggagctatatcgcgtgccgtattctggcccagcaggggttcaaatgctataacctctccggcggctggcggctgtatgagacggtggtgcgggaccggaccgccgcacaggaggcctggccctgcgggatggagaagtaaacaggaaaacgcaagccacccgctgcaaaggcagcgggtggcttcattcatgattgatttcgacggaaaggacatcttgagtagcatctttctgcggggctgcacgacgcgccgcccgatcctgccgcagggccgccaggatccccaaggatatgatcccgcacacatagagatactgaaatccctcatcgccgccgctggaatcaaaaaagtggacagaggaaaaatcgtcatccggaaacaccagaacaccgcagtaccgtagcagtccatagatcattcctgcggccagaagggccagcccgatcagaaggcacaccctgacgatctgccgaattcgcggccctttccgctccagtccccagcgggcggcggcaaagcagagaatgccgcagggtaacgacagcggcagatacgtcagtgcttccaccagaaacagcttcatatcggctcccccttttccactatgatacacactctttggccggaagtcaacaatgccctccggcgcggggcggaggcagcgagttcgctttctgatgaaaaaacaggacacccaaagctgggtgtcctgtttcactctggagcgggcaacgaggctcgagctcgcttcccggcatcccgcgaatggctgaccgccattcgcaggacccctgcctcacctctgatccaatcgcgccttcggcgcggggcggaggcagcgagttcgctttctgatgaaaaaacagaacacccaaaattgggtgtcctgtttcactctggagcgggcaacgaggctcgaactcgctacctccaccttggcaaggtggcgctctaccagatgagctatgcccgcggaacaagaggtattctaccagagaaacacccgcttgtcaagactcttctgcaagattttccgaattttcttccgcagcagccgcggcgtctccgcccatcacaaactcgatcagccccaccggaccctgtgccggataataggagatcgtccagggcggcgtctctgccagacctcgcgcctcccggagctgtgccaccgtctcctccacccgggcctggccgtcctctccccaatagccgacccggaccgccagctccgtgcggccctcgtccagcgccgcctccagcagggcggacagcgcctccgtactggtggcgttcaccaccgcctggatctgctccgccgtccggcggtagctgacctggatgctgatctcatagtacccccgctgggaccggctggaggcggtgatatactccacggcataggcgcccataggcgtctcctgctggacctccgtagtggcctgctccagtgtgtccgccaccgtcagatcgtcctcgtagttgtagaggcggaccgtggcgctctccgtgtgctggccgatgaggatcagcaggtcgttcacgatgtcctggtagttctccgcccggagagtcccggcggcctcgctctcccagaacttgctgctgtggggctccacggtggcatagttccgctccagcagggcgctgcaccccgtcagggacaggctgacgcacaggagcagggtgagatggcgcatcttcacggctcggcgcctcctttccggtcagaatggcccagggacgggcaggggcgcgcttacagccccaggtcctcgtccaccagcaggacctccgtctccatgcccagcataggcccccagagagtcaccaaggcgcggcagacccgctcaggactccggcagtcgtagcagcggtccgccttcacggcgcagggcgtcttcttccccagctgccgggcgcgctggggtgcagccacgttccgggcccggtacaccgccgcctcgtaggtgggggccagcttgttccggccgatgacaaagtacaccttctcatggccgaacagcgtagcggacacccggttgccggtgccgtcgatgttgacgatctcccccgactccgccaggccattggcagaggacaggtacacctgggtctgcatggccgccttccgggcggcgttcgcctcctgcttccagtgccagatgacggtgttgtgggccgccagcttgtcgtacacccccagagcgtccagggtggcggagccgccgaagcccacggtcttgccgtcgatggcgccgtccaggtaggccgcggcctccgccgccgccgcaaaggtgcgtacggtgtagccccggcgctccagggcctgctgaaccttcgtgaaatctgtcatgtcaaatttcctccttctgataatccccaaatccctcgcccaggatctcatgggcgtcgcacacgatgaaaaaagccttcgggtcgatctcccgcagcatccgcttgatgggcacgatctcccgctgcctgaaggccaccagcagtacctgcttctccgcgccggtgtatgcgccttttccctgaagcagcgtcacgccccggttcatatccagcagtccctggaccgtctcctcccaccggtcggtgatgatgtaggccacacgagaggtatcccacccgtacaggatcatatccatgaccttggacagcagatacatctgaatcaagccataaagtgccgcgttgacggtgccgaacaccactgcagccaggatcaccaccaccatgtccgggatcatcaccagcttaccgatgggcagccaggggaatttcagcttcagcagcttgccgatgatatccgtgccgcccgtcgtggccccctgggagaataccaatcccagccctacccccatcccggcgccgccgtacagggtcgccaggatcgggtccatcgggggaaggtatgcatccatgcaatcacgtcaatggccaaggaactgactgccatggcgtacaggctgctcaccagcaggcggcctcccagcagccgccagcccgccagaaacagcggcacattgacaaggatggacagcactcccaccggcaggaccggcaccagggcgttcacgatctgggccagacccgtcacgccgcccatggcgatctggttgggggctacgaaccagtcaaatgccagggcgtagatcactgcccccagcgtgatgataccgcagctcctcaccttctgcgccatagatctactccttttctatctgattcagtccagcagatccatctgccgctcctcggagtcctcctcccgcagcagggcgcccgccgccgggagactgcgcacccggtagcggctctggttggtgatgggcgtgtcctccagcgccttcaccgtctccagctggtactttggcttcagggtcatcaccgccaccccctgggtggtgcgggtggtcttgggagccagcagagcggtgtggaaaatcagcgcccggggctccgtggagtacaccgccagctcgcagtctgtatccagcctgcggatacaggccaggggcgccttgtcggagtaggcccccgtcagcttgcggcggttggaggtggtcttgtaggcggtcaggtccacccgggccgccttgccgtttgcaaagaagaacagcagggccccggcgtagtccggtcccggcaggacggcgtagatcacattctcgccgctgtccatggagagtttcgcgggcagatagtcccccaaggcgctggccttggtgtcttcaaactcgctgaggcgggtcttgtacacctggcaccggtccgtgaagaacatgatctccgcgccgttggtggtctcaaaggtctgggacaatccgtccccgtccttgtacttctggtccgccgccattcgcaaagaggcgggggtgatcttcttgaagtacccctccctggagaggaacacatggacggagtagtcctccacctgagcctcctccacataggtctcgatctcgtggctgtacacgatggaggttcggcggggctcgccgtatttcctggccgcctccgtcagctcgtccaccaggatctgcttcagccgccggggggagttcagggtgtcctccaggtcggcgatctcgtcctggagggcgtcggtctcgttgacacgcttgaggatatactccttgttgatgttgcggagcttgatctccgccacgtactccgcctggatctggtcgatgccgaagccgatcatcaggttggggatgacctcggcctcctcctctgtctcccggatgatttggatggccttatcgatgtccagcaggatccgcttgaggccctttaagaggtgcagcttgtcctgtttcttcttcatcacgaagtagacccgccgccggacggacccggtccgccaggcagtccactcctccaggatctgccgcacccccagcaccttgggagtaccggcgatcagcacgttgaagttgcaggcaaaggcgtcctccaggggtgtcagcttgtagagcttggtcatcagcttgtccgggtccacgccccgcttcaggtcgatggccagtttcaggccggagaggtccgtctcgtcccgcatgtcggcgatctctttcgcccggcccgccttgatgagctccgccaccttgtccaggatggcctccacggtggtggagtaggggatctcgtagatctcgatgagattctcctctttgacgtagcggtacttggcccggacccggacgctgccccggccggtctcatagatctcccggatggtgttccggtcgaagatcagctctccgccggtggggaaatccggcgccagcagggtctccatcaggtcgcagtccgggttcttcagataggcgatggtggtgtcgcagacctccttcagattgaacccacagaactgggaggccatgcccacggcgatgccgctgttggcggacaccagaatgttggggaaggtggtgggcagcagggccggctccttcatggtgttgtcgtagttgtccacaaagtccacggtgtcgctgtcgatatcccggaacagctcggcgcagatgggcgtcagcttggcctctgtgtaccggggggcggcccaggccatgtcccgggagtagaccttgccgaagttgcctttggaatccacaaaaggcgtcagcagggcgccgtagccccgggagaggcgcaccatggtgtcgtagatggcggcgtcgccgtgggggttgaggcgcatggtctggcccacgatgttggcggacttggtccgggctcccgtcagcagacccatcttgtacatggtgtacagcagcttgcggtgggagggcttgaacccgtcgatctccggaatggcccgggagacaatgacgctcatggcgtagggcatgtagttggtctccagcgtgtcggtgatgggctgttccaccaccgccgcgtgaaggccgatgacgttggacgcgtctaccttatgcttgttgtcgtcggtttttttctttttgggcaagtgtaatcagtccttatcttgtatccatttcaaggggttgttgcggatgtactggcgaacattggctaggtcctcgtcattgcggatcacatggtcataaaagcccttctgccaaagagaaatgcccgcttacttgctggtgatccgcttcatctgctggatgacgttcgacagcggcgtaggggcggcaatctgccgctcgtccggcccgatgtgccggagtgccaaaatcaaatgcacatggtccggcatgatgatatattgatctaccgatatgccggggtagtgatccgggatcgctcggatggtttcatccacgatccgccccagaggtgtcagggagattcgaggcgggcgattgataatcgcccctacggcgggttcgatggaacacaggacctcctgattccgctccctggtgcagatggtgatgaaataagatcccggctggctgtaatcataggactccagccgcaggcgcttccgctgggggcgttccatggcatcctctccgctatccgttgattgggagtgtattttccgttgtcgaaacagagggtgctttctgtcccaacggctacgcatttattaacccaaacagccaaaatacttgaaataattcacgtattgcgcattttccgaaactctagtatgctgtattcataaaattcaaaggaggctgctccatgaatgagacctataaatggctgtatgactactacgccctgccgttgatgaaagtcggcaaacaggcggatgcgctcaaagagcggatcgtctcccacggcagccctgcggacgcgctgttcctgtgggaccggctggaagacctgtgcctgctgtggggcacggagtcctttgccatcgggctccaactgggcctgcggctcatggcgggccagcgggcggacgggctgctgatctcataaaactctcacgaaatatccgccatctccaggtacttgtacccgttctccgcaatatggtccttccggccctggaggttgtcccccagcagcaggtcgaacaccgccgccgtctgctccacgtcctccggcatcacccggatcagccgccgggtctccgggttcatggtggtcagccacatcatgtccgggtcgttctcgcccaggcccttggaccggtcgatcttgtacttcttcccctccagggatttcacgatgtcgttcttctccttgtcggagtaggcgaaccacgtcttgtcgccgctgttgatctcaaacaggggcgtctccgcgatatacacgtacccctcccggatcagggtgggggtcagccggtacagcatggtgaggatcagcgtccggatctggaagccgtccacgtcgccgtcggtgcagatgaccaccttgctccaccgcaggttgcccaagtcaaagggcgccacgttcttcacgtgcttgttctggacctccacgccgcagcccaggaccttgatgaggtccgtgatgatctcgctcttgaaaatccgggcatagtccgccttcaggcagttcaggatcttgccccgcaccggcatgatgccctgatactcggagtcccgggccagcttcacgctgcccagggcgctgtcgccctccacgatgtagatctcccgcttgtccacgtccttggtgcggcagtccacgaacttctggacccggttggcgatgtccaccgagccggagagcttcttcttcacgttcaggcgggtctcctccgccttctcccggctgcgcttgttcagcagcacctgctcgccgatcttctctgcgtcaaaggggttttcaatgaagtagatctccaggttgctgcggaggaactccgtcatggcctcctggacgaatttgttggtgatggccttcttggtctggttctcgtagctggtctgggtggagaagttgttgctgaccagcaccaggcagtcctcgatatccgcccaggtgatcttgccctcgctcttctggtacttcccctggtcccgcaggtacttgtcgatggcggagacaaaggcggacttggccgccttctccggagagccgccgtgctccagccaggaggagttgtggtagtgctcgatgacgttcaccttattggaaaagcagcaggccacgctgagcttcaccttgtactccggcttgtccgcccggtcccggcccttcttctccgtctgccagaacaccggcgccgtcaggctcccctctcccgcaagctccgtcacatagtccatgatgccgttttcgtagaggaactccgcctcttcgaaccgacccggctctgtctcgttccggaaccggaaggtgaccccggcgttcaccaccgcctggcgcttcatcacgtcggtgaagtactccgccgggatggcgatgtccgtgaacacgtccaagtcgggaagccagcgggtgcgggtgccggtttttctggcctggctcttgagcaggggcgccttccccagctcccccacgatctcgccccgctgaaagtgcagggtgtattcaaagccgtcccgccagacggtgacgtccatgtaccgggaggcgtactgggtggcgcaggcacccaatccgttgagccctaaggaatattcgtagttgtcgccggagacgttgtcgtacttgccgccggcgtacagctcgcagtacaccagctcccagttgtaccgctgctccttctcattccagtccaccgggcagccccggcccgcgtcctccacctggatggaccggtctgcaaaccgggtgacagtgatggtccggccgtggccctcccgggcctcatcgatggagttggagagaatctcgaacaccgcgtgctcgcagccctccagtccgtcagagccgaaaatgacgccgggccgcttccggacccggtctgcgccctttaatgccgaaatgctgtcgttgccatagtcctgcttcttggttgccattaagttcctccaaaggcagtgtctgccgtaaaattcataaatttattgtagcacacccggcgctgtccttcaagtgctcccccaaaagacgccgtgatcccgcccgcttcccgacgcttcacacaaattttacaaaaatgttattgcgtaaaatttctcataacctggccgtcacccagctcaatgcccttttcatcggggttttgcacattctccacagagttttccacaccgttatgtcaacttttgaaatacgaaaaaaataccgcgccgcgcacaccccggccggacgctccgtttttcggatcagatgcttttacagagcgccttttcagccagccggatacccggaatttttttgtagttgcaaatgcaatatatgcgcacatttggatatgctaatatattgccagaagaaatccctctccccttgaaagtatttcaaaaaacggaaaaaggagaattctatatgaagttctatatctgcaaacattgcggcaatgtcatcaccaagctcacctccgcccaggtgcccgtgaagtgctgcggcgaggagatgcatgtgctggaggccggtgtcaccgacgccgcccaggagaagcacgtgcctgccgtcacggtggagggcagtctggtgaaggtggacgtgggctctgtcacccatcccatgaccgccgagcactttatccagtgggtggtggtggagactgagcgggacgccctgatccactggttccacccggaggagacgccggaggtcgtgttcgccctggcggagggccagactgccaaggccgtttatgcctactgcaacctccacggtctttggaagaaggacctgtaagctgcgagacaccagaccgccccggcgctgcacagcgccggggcggtcttctgacttttgagatcggatatatttaggatataggaagcctctgtgggtgcagcatccccaaagcgggacggcatggcattcccgcttcagccgagcagcaccaggaccacgccgtaaatcaccgaggccagggtgccgaacacgatcaccggcccggcgatcaggaacatcttggccgccatgccggtgacgaatccctcgctgcggaagtcgatggccggtgagaccaccgcgttggcaaagccggtgatgggcaccagcgtcccggcgccgccaaagcgggccagcttgttgtacaggttcagccccgtcagcagggcggagagaaacaccagcgtgcaggaggtggcggtgcccgccgtcttttcctccaggccggcggcagtccagccgttcaggatcagctggcccaccacgcagatggccccgcccactacaaaggccaggaccgtatccttcagcagcggcgacttggggccttctgcttcacatactgctggtattcctgcggcgtcatattcattgaaaatcccctccaggccattttcccatagggtctcctgcttgttcggaaactatacgcacttgcaaacctgcgcggaagggagtacactgttgcccgaagatttgtgtgtttggaggaatccccatgagacccatgcccgccccgctgggcctgtatatccacattcccttctgcaagagcaagtgcgtctactgcgacttctactccctgccccggtccgagagccggatggacgactacacggatgccctgtgcgcccatctggcggagaccgcccccttcgcggcgggccatctggtcgacaccgtgtacttcggcggcggcacccccagctatctggggaccaagcggctggtgaagatcctgaagaccattctgaaaaaatacaaggtggacaagcaggcggagatcaccctggaggccaatcccgactccgccggggactggaaagagctgcgcaccctgcgccggtgcgggttcaaccgcctctccctgggaatgcagtccgccgatgacgaagagctctcggagatcggccgggtgcacaccatggctcagacggaagccgccgtggaggccgcccggaaggccaagttccagaatctctccctggatttgatttacggcctgccccatcagacgctggaggggtggcagaaaaacctttccgctgccttggacctgacgccggagcatctctcctgctatgggttgaaggtagaggagggtacgcccctttttgcccggcgggggaccgcgggtctgccgggggacgacgcccaggcggacatgtatctctacacggtggagttcctgaaggcccagggctatgagcagtatgagatctccaacttcgcaaagccgggctgcgcctcccggcacaatctgaaatactggaccctgggggagtacgccggcttcggccccggcgcccactcggacttcggcggcgtgcggtacgcctacacaaaggatctggagggctatatccggggcgtgcgggaccacgcccccatgctgtcggagagcgaccgcatcccacccctggaccgggacaccgaatgggtaatgctgggcctgcggaccacggcgggtttggaccccaaggcatttgagcgccgcttccgccgccggttcacctgctttctgcccttcctggaccagtgcgccagggccggctatgcggtggaggaggacggccgctggcacctgacgccccggggctttctggtgtccaaccagatcatcggtgggatgctggatgccctggccgcggacaaacagcggcgggccgatgccgccgcccggggagatttccgggtgaacctggattgaatgaaaaaagccgcccgctggaatgctccggcgggcggttctttctcatgccttccgggcccggatggcattgaccgggcagccgttggccgcgtcgaaggcccccgcctcctccgccggggtccggggctgggcctgcaccacggacacccgcccctggatctgaaacacggccggcaccgccgccgcgcacatcccgcagccgatacaccgggaggcgtccacattgactgtcatgcgcttcctccttttccgcgggctgcgcccgctgttcccttttattgtaatacaccgcgccggtttctccaagtcttttctgcggcgggcggaacttttttcccgcagacgccgtcttgtatttgggagactctgtgcaatctggtggattttgttgccccattcccatttacttttccgcctgtttatgctattctgaagaggattatgtagaccatctcagctgcagcttatggaggtatgacatgaaaaacaccctgcgcaaaaccctgtccctgtttttggcgttcacgcttctttgctccctgggcctcaccgccgccgcgtccgaggccatgggcgaggacctgacctccaagggcactcttttgaaccagaagacccagctctccaccaatgtgttttggagtactgcgtactccgacctgcggacggagaacgtcgtcacatacgagcccaatgcagatgtgacgcccatcgtcaccttcggggactccctgaccacccgcaccacggtcacctctgcggcccgggcactggagagccagggctaccgggtggcggcgggcatcaacggcgacttcttcaacacctccaacggcctgcccatcggcatcctggtgtcggagggagaggtcctcagcagcgacggcggctactacgccatgggtttccgggaggatggctctgctgtcatcggcaagcccggactctccatctccgccaacctgggctatcagggttcggacagcagcgggtacttcacggacatcatccgcacggtggccggcatcaacaaggcccgggtctccaccggcggcatctacctctatacatacgacttcaacaaccggcacaccaccggcaataccgaggccggcgtggacgtgctgtgcaccatcgtggacggctccctctccatcggcggcaccatgacgctggtggtggaccaggtgatcgaggccacctccgcaacggccatcgggccggaccagattgtcctctccgccaacgccctctccaacacctactacaccgacgccctgcggaacatccctgtgggcgccacggtgaccgtcaccgtctccgccgccaatgaggcgtggaacgatgtgcagtacgccgtgggtgccttatactccctggtgcaggacggcgccgtggtctccggtctgccctccggggtgaacccccgcacggcggtgggtgtgacagctgacggcaccgtggtgttctataccatcgacggccgccggtccggccactccatcggcgccagcctgagccaggtggcccagcggatgatcgagctgggctgcgtggccgccatcggcctggacggcggcggctccaccaccatcaccgtgacgcagcccgacgacaccaccgccgctaccatcaaccgtccctccgacggcagtgagcgggcggtggccaaccacctgttcctggtggccaccaatgagcccaccggcgaactgggccacttctacgtccaggcggacaacgcctacgttctggcgggcagcaaggtagagatctccgccgccgccgtagacaccaactacatccccatggacgaggactatgactacgacctggaggcctccgacggggagctggacggcaatatcctcaccaccccgaaacggggcggtgagatcaccgtcaccgcctccagcggccgcagagaaggctctaccaccgtctacgccatcgaggatcccacggacgtggtgatccgggacagcagcggcaccgcgctcaccacgctgaatgccgccaccggcaccaccacccagctggccgccaccgccgcctacaaccacatctccctgaaggcggatccagaagccttcacctgggaggtcaccggcgacatcggcacggtggatgagcacggcctctttactgccgccgcgcccggcaccggcaccatcacggtctccgccggccgggccagagtctccatccccgtcaccgtctccagctccggcacggtctccgccggcggcgtcatggaggtggagtcctttgagggcagcaccaccatcttccggggcagcggcagcaacatggacttcagtctgaaccacagcgccgacaccgtgcggatgggcagcggctccgccaaggtggattacactcttaccgaaaccggcgcatcccaaggcgcctacaccgccgagtggcgggcctccaagtccacgggcatcgactgcagcacctatactgccctgcacctgtgggtctacggcgacggctccggcaacatcctgtccctgctgtacaacgatggcgccgcaggctatcagtccctccaggtaaccccgctggacttcaccggctggaaacaggtcaccgtcaccctccccggcgcacacttcgagattcagggtctgcaggtcagcgccaccaccgccgcagacggtacggtttctgtcggcgacaagctctccggcaccatctatatcgaccacatcaccgccaccgcctccggcacgccggacaacgcggcgcctgtggtctccgcctccctcgacaattccctctggcaggtgaccgcctcggtcgccgacgcggtggatggcatcctgccagcgggcagcgtcaccgtcacctacaacggcgccccctacggcagctatgatcccgccaccggtcttgtgaccgtggccctgcccggccccggggagagccacgaggccatgcggatcaccatcaccgcccgggacctctccggcaacatcggccgggcctccgtggatgtggagccctacggcgtggaccacaagttcacggacatcaacgactactgggcggccacctatgtggacttcctgtacaacgccaatatcaccaccggctatgccgacggcaccttccggcccaacgacaacatctcccgccagcagttcgcggtgatgctgtatcgctacctggggctggacggcacccagtatgagagcgtgacgctgcccttcgcggacaacgcctccatcggggattacgccctgacggcggtgaaggccctgtacaccgagggcatcatcaacggctccaccggcagcgacggacggctgtacttcaatcccggcgggtccctgacccgggcccaggccgccgccatgatcggccgtacccaggagaagggctacgccattgtcgatctgaccttctccgacaccgcctccatccctgcctacgccacctactacatccagaccatggcggcccagggcgtcatcagcggctatgcggacggcacgttccagcccggagccaacatcacccggggtcagatggccaagatcctctacaacctgatgtgagtttcgcctttcagaggccggcgcatccgcgccggcctctccttatggagagcgtcttttcggaatctgccgggtgctgcaaagcgctatcgactccaatcccctgtgatttcaggaaagggtctcccccggggcccgtccaggcaaatgccgccgggcacagcccttcccggtcggcctctattcaggcggccagggctgtccggtgaagccggaagatggaaacggtgcctgttgacagctcctgccccagggtgtaaagtaatcatattccacatcctgtccgcggacaggatgtctctttgcgaggaggccccccatgaagctgagacgttccgcctgcattgacacgctgtacctggagctgcccttcctggaccggttccaggcggcaaaggaggacggctttgacgccgtggagttctggagctgggcggaccgggacctctctgccgtcaaatcggcatcagatcgggccgggatccctgtctgcggcttcaacggggacgcggacctctctctgatcgaccctgcccagcgggaggcgtatctggcctttctgcaccgctctctggaggcggcccggttcctgggcgcctccggcgtcaccgtccactccaacggtctggggctggggggcgtggtgctggcgccccgggaggacctctcccacacggtgaagctctgctccctgtacgcgggccttgccgccagcgcccgcctggcggaggaggcaggcgtcaccctctatctggaaccgctgaacatctccacagaccaccccggtaattttctgcgggacacgcagacggcggcggagctggtacgcctgatcggctctccccgcctgaaggtcctgtatgacatctaccacatgcagctgaacgagggccgcctctgcgacaccatccggcagtacgccgataccttcggccatgtccacgcggcagacgcccctggccgccgtgagcccggtaccggggagatcgccttcccccgggtctacaaggcgctggaggccgccggctacacagggctggtgggctatgagctgtttcccgcccgctccacccgggaggctgtaaaggccattctggacgccggctgacacgttgaccggtaccccctgtattctgcgaaaaaggacggatccaacaagatgcactccataaaaatcgctctctcccgctatggctggttcactgccggggtcctgctgaacgccttcggcgtggccctgattaccaaggccgcgctggggacctcccccatctccagcctgccctatgtgctgagcctccgctttcccgtcacgctgggacagttcacttttttgatgaatatgctgttcattctggcgcaggtcctgctgctgcggaaggacttccgtcccgttcagctcctacaggttgctgtgaatgtggtgttcagcctgttcattgatgtgagcatgggactcctctcctggatggaggtcggtgtgctgcccatgcggctgctggcgctggccgtgggctgcgccgtgctgggcttcggcatcagcgtcgaggtggcgccccgggtgctgatggtccccggcgaggggatcgtccaggccatcgcagtcgtcaccggccgacagttcggcaatgtaaagacggctttcgacgccacgctggtgtccacagccctgctcctctccctgctcttcttccatcagctccagggcctggagatcggcaccattttttccgcactggcggttggccggttcgtgaacctctataaccggagactgccgctgatctcccgcatctccgccctgggtgcaagaacctgaaaaatcagtgttgcatcccttccgttgttatggtatattagcagataagtaagttggcctgccggccaggaaggatctgtgaacccgcgtggacgaacctccgttgcccacccatacataccgaggtgtctttcagaaggacagtctgccccaaggggtgagactgcccttttcgcgttttgggcctcagggatccgctgatttttttgaggagtgatgatttttcccatggacagttccactatatcaatgaccgtggccatcgtcctgctggtgatgatgtcggcctatttctccgccacggagaccgccttctcctgcctgaacaagatccggatgaagagccgggcggagtccggcgaccaccgggctgctcttgccatggacctggtggaggactatgaccggctgatctccaccatcctcatcggcaacaacatcgtgaacatcaccgcctccactgtgggcacagtgctgttcaccaagctgtatgcggcttacggccccaccgtctctacggtggtgttgacgctggtggtgctgatcttcggcgagatttcccccaagagcctggccaaggagcacgcggagagcttcgccatgttctccgcgcccatcctgcgggtgtttctgctggtcctgcggccactgaacttcctgttctcccagtggaagcggctgctgaacatgatcttccacccctctgaggaccagggcatcacggaagaggaactaatcaccatggtatccgaggcggagaacgagggaggtctggaccagcacgagagccagctgatccgctccgccatcgagttcggcgacctggaggccggggacatcctgacgccccgggtggacatcgtggcggtggaggactctgcctccatggaggagatcgccgccgtgttcgctgagagcggctactcccgcctgccggtgtaccacaaggacgtggatgacatcgtgggcgtgatccatgagaaggacttcaacgccgcccgctaccggggccagggcaacatctccggctgcatcacgccggtccactataccaccgccaatgcggacctgggcctgctgctgcggacgctgcagaaaaaaaagacccacatggccatcgtggtggatgagtacggcggcaccgagggcctgctgaccatggaggacatcctggaggagctggtgggcgagatctgggacgagcacgatgaagtggtggagtccttccgcaagcagagcgacggcagcttcctggtggccgccggcgccgacctctccgacttgtacgatctgttctccatcaagggggactgcgacgccagcaccgtctccggctgggtgatcgaccagctgggccgcctgcccctggtgggggaccacttccaggcggagggcctggacgtcactgtgaccatggtggaccaccgccgggtgctggaggttcgggtggccgtggcggcggaggcgccggagaccgcggagggcgcggcacagcactgaccggacgaacccgccgcccgtcccgccagagccccggcgggacgggcggctccctcatttgaaaccggaggtcttatgtacgtctattccctgggacagtggctgctgttcttctttctctactgctttctcggctgggtgtgggaatcctgctacgtctccgccaagcggcgccagtgggtgaaccgtggctttcttcacggccccatgctgcccatctatggcaccggcgccgtcatcatcctgctggccaccatccccgtgcgggacagcctgtggctggttttcctgctgggcatgctggccgccacggcgctggagtatgtcaccggtgccgccatggaggccctcttcaaagtccgttactgggattactccaagcagcccttcaacctcaacggctatatctgcctcaccagctccctggcctggggcgccttctccatcctgctggtgcggtttctgcacccgcctgtggaggatctggtgctgcggctgcccgccttcctggtggatcctctggcgttcctgctgaccatcgccgtcaccgtagacgcagtccggtccttccaggccgccatggacctgcgggaggtcctcacccgcctcacggaggagaacgaggacctgcgccgccttgccaagcgggtggaggtgatctccgcctttgcggaggaggacctgcgccgcttccgggagcgcacggaggtggagcggctgctccggcaggagcgctgggaggacacccgccgccagattcaggaggcctatgccaagggcgcccgacgccgccaggcccagctggaggagtccctgcgccgccggaccgatgccaagctgacggcccttgccaacatccaggaggctctggaggcctaccgggaccggctggcagttgccagggacctgacagaggagtctctggaggcccgccgggcggaagtccagcagcttttggaccgactccgggaccgggaagcttccatccgcgcccgcaccgccaggcgttatcgccagtccctgcgcatcctgcggggcaacccctccgccagcgccaaagcctttgccgaggccctggagtccctgcggaagctgggggatcgccgggaggggaggacggcgaatgaggaaagccggcgcagcagcccctgctctgcagagcggtcgttggttccatacggagcggacgtcccttcttttcgtgtccccttatagcaattctccatctctgtctgaaccgacgatcttatacaaacaaagcggcacagccttcggctgtgccgctttgtcgatcaggatggcagcgtggacttgttctccgcagcgggcgggtccgcggggaaatccagaatccgccggatgcacagggcatagactgcgatgctcaccaccggccccgcgatgtcggagatgggttccgcatagaatgcggcccgggcgccgaataccgccggcagggcaaacagggcgataaagtacaccgccttccggaaggcggacaggggcagggccagctgtacctttcccatgccggtgaatccgtccacaatggcgtactgcagccccagggggatcagggccagggtgcagatgtggatggcggagagggcctccgctgccagctccggctccgtggtgaagaggcgcacgaagagagctccccccagacgggccagcagaaacagggccgtcacataggccacgcacagtccggcgatgaatgcctgggccttcaggatccggtcccgccgccgggcgccgtagttgtacgccaggatggtgcctgtgccggcggaaatgcctcccaggggcatggtcaccaccagcatgaagctctgggcgatggtggcgcaggtcaccagacggtctcccagctccgccccgccataggactggaggatggcgttcatggagataatcatgatgttgtccacgccgatgatgaggaagggcgtcatgcccaccgccaggatgcggagcatcagccgcccgtcgtaaccgccgaaagtgatggcgatgggcacagacttgccgaagaggaaccgcagtacatagaggcagctaaccagctgagagaggaccgtggccacggcagccccagccacccccatgtcaaagagaaagatgaacaccgggtccagcacgatgttcagtgccgcccccagcatgacggagatcatgcccttccgggcgtagccctggcagatgatgaactggttcagccccagagccagcaggttgaacaccgtcccgcagagatagacggtgaaataggtattggcgtagccgtaggtggcatcgcttgcgccgaaggccatcagcatgggctggcgcagggggaacacccccgccatcagcgccacggagcagacacacagcatcagaaagctgttggagaggatccgccgggcctcctccgttttacccgcccccatgcggatgctcatgagcggcgcgccgcccacgccgataagagaggcgaatgcgccgatcagcgtcaccaccggcccgcagacccccacgcccgcgagagcggtctcccccaccaaggggatgttgctgatgtagatgcggtccacgatgctgtacagcacgctgacgaactgggccagcatactgggtatggcgatccgcagcaccaggggccggatggcgtccgtgcccagattgttctccagcttcatagcaggtctctcccaaaacacacaaaaatcgggctgtccgcaccggacagccctctcattataaagacacgggattcagtttgcaacccccgattcgccccggaggatagcggagagctgttcgcacagtgcggcggcctgcccactgccaaaatagccgatacggaccacccggccgttgaccctggctttgccggtgccgttggagacggaaaacttccgctcaaggtccccgctggcatccagatccacgatgatgtcgccgatctccgaaataacgtctgcgactgtcagtgtatcccagcagaaatgataggtgtactgatccaacagctccaggattgcctctgcctgttcgctgtccgcagagacagtatagctctcagagtctgtctggctctgcccgtctcgcacatcgagggtgaccaaaaagccgtaaaaatcctcgccctccagatccaccgcatccccgatggagcggggccacagcatccaggctgcaaaggccaggacggccgccgccagtaggaccagtaccactcgcttcacgcttcgggccatgaaatccctcctctgcaaatagggccgccggggctcagccgcacttgcggacgctgcccagcagggtctccaaagccatcagccccaccagcacagccagcgccgccagcaggatcaacagccacttccacttgccgcggatcatctctccgccccctcggtcttgttttttccaacataacataggccatggaatttgtccataccgcgtctgaaggcaggcactcaaattccccgcaggtcaaaggccggggtgtactcctccctggccgacgtccgctcctgggtgtagccgtcggtgatcccgcagttttccatgtactccactgccgcccggtactccgccttggtcacgtggcgggccagtttcccttctgcccctggctggggcgtatactggctcatgagggaaaacagcacctccccgggcggaagctctccgccacccagtcgatgactcttcgggtgttctccagttctcccggcaacagaagatgtcggatcaacacaccctgctttaaaaggccgttttccatccggtaaggcccggtctggcggaacatctccagaatggcccgcttggcccagtcaaagtagtccgccgcgccagagtatttgcgggcaggttcggagaggccatacttcaagtccggcagatacacctgtaccttcccctccagacggcggagggtctccggtttctcatagccgccgcagttccacaccaccggcacgggccattcctcgtcccccagggcctccagaaccgcgtcggtgaagtgggtgggggtcaccaggtccaggcaggcggcctcctgtccgatcagctcgtgaaagatctcccgcagccgctccgccgtcaggacctttcccacctccccctgggagatgggcttgttctggcagaagcagcaccggagattgcagccggagaagaacacgcacccggcgccgcgctcccccaccaggcacggctcctcccagaggtggagcatggcccgggccgccacgggcacgctgggcatcccgcacacgccgccccgcctcgtctccgtccgctcctcgccgcagtttctggggcacaggcggcagatcacagcaggtcctcggggcggaagtccgggcccaggtccccggccatccagtgcttgcggcacagcccgatgtactggtcgttggcccccagcaccacctgctcaccctccttcagcaccttgccggcagcatcgaaccgggcgttgaaggtagctttcttgccgcaccagcagatggtcttgacctcctcgatcttgtcggccatcaccagcagggcctcgctgccggggaacaggtcccccttgaagtccgcccgcaggccgtagcagatgacggggatgcccaggtcatccaccagacccaccaggtacatgacctcctcccgggtcaaaaactgggcctcgtccacgatgacgcaggcgttctgctgcagttccatgacagagagctgctgcatctcgtcaaagtagatgcagggataggtgaggccgatgcgggaaaccaccatgtggtccccgtcccgggtgtccagccggggcttgaccagcagggtcttctgcccccgctcctcgtagttgaaccgggtcatcagggcgtttgcggtcttgctggaacccatggccccgtatttgaaatagagctgtgccatttgtctgttttctccctctctatgtatcttcttatgcggcactccgccgccttctctttggtgccggtcccctccgccgggagggatcctcagccctgcagcccacggtcgatcttccgctgggcctcccgccgccgctgttcctccagctgctccgccgctttctccgacgtcaggggcttggggatctcctcctccggaatttccatcaccatcctgcggcagctgcggcagagccaggcggtcttgtacctgttgaaaaggctcccctcatggaggatatcgatctccgggccgctggcaccaaagaaccggttgggccagccgggccaccactggacactgtcccgtcccccagtgatcgtccccacctccatctcctgcccgcaccaaggacagatcatgggcgggggcggggtctcccgcagggccttcttctccttccgctcctcgttccagtcccggagctcgtccatcaggctgggagcgcagtccttctcctcctgccccggctccgccggacgggacggcttttccggctcatagtcccagggatcctcgcttttcttccagaagggcacggtcactcctcctctcggctttcggataaatgctctgcatcagccccgtagatgatgcggcggttgatctcctcggaggtcagatgctccgcccgggtgcagttggccgtgtcaaggaccagcttgcggcacgccccgcagtgccaggccagcttgtaatcgctccagaaggaaccgtccccccggaggtagagggttccgtcggcatccgccaggcgaaacgcgccgggacgctcccacaccaggcggacagcgtcccttccgcccaccagataccccatccgcatctcctgcccgcaccaggggcaggtcatggcagacggcgtctgctcctccgctgtctccttctcccctgggaccttccacgcctccccgtcggcggccgggggctggggctcccccgctgtccaggtgcgccgtttctccggctccatatcccagggatcctcgcttttcctccagaagggcatcacgaatcctcctcgttttgctctctcgcctgccggatgcgttcctcaaaggtctcccccgtccgccggggcaggaaggagacgggctccggcgtctccttcccatggtaatagcaccacagccaccggaggcaccagaccagcttgcggatcagcagggccagcagggcgatgcccgccaggttgatgagttccattcagttgccctcgtccttcttctggtcctcggagtccgggacctcctcataatccaccgtatacacagggccgtgaaatttcggctcctgcctgtcctcgtcctccgcccggtaccgggcggaccgcctccgcacatgccgcaccaccaagatcaccgccacgagaatgagaatgggcaccgcaaaccgcagcgccaccagcaaaatactccccagcagccgaaacagccccaggggcagtcccaccagccagcccattcgtcactcctccttcaagcgtgctgccgcttccgtgtaataccgcccaaaggcggagggcaccgcccggtccgacagggctccggcatctgcccagacgaagtccgccgggccgtctcccgccacctccagggtgtaaccggtcatgtgccactccacatgggtaaagatgtgcttcgccgtcagtcggctctcccaccgcctgggctccaggccccagacggacaccgccgctccggcggcagcctcgtccagggctccctccacgttgggaaactcccacaggcccgccagcaacccggtccccggccgcttccgcagggcgatctttccgtcccgcaccagcaggaacaccgtcttctcctccacccggcgggctttttggcccccttcactggcagatcctctgccgtgccccgaaggcggcccttgcagaaggccatggccggacactccagacaccggggcgggccgttgggtgcgcagaccgtggcccccagctccatggtggcctgattgaagacgcggatatccgcctcagcctccggcatgacggcctggatctgtgcccgcacggccttttttaccttgggatcggcaatatcgtcccggcagtccgtcagccgcatgaccacccgcagcacgttgccgtccaccgccgcttcccgtcggccgaaggcggcggaggcaatggcgctggcggtgtagtcccccacccccggcagggccagcaggtcctggtaggtgtccggaaaccggccgccctgctccgccacgatcctggcggccttctgcaggttcctggcccggctgtaatagcccaggccctcccacagcttcatcagccgctcctccggggcggctgccaaagcctccaccgtggggaatgtctccagaaagcgggcataataccccagcaccgccgctacccgggtctgctgcagcatgatctccgagacccagatctgatacgggtctgtggtccgccgccagggcaggtcccgggcattggcccgataccacgccaacagcggccccggcaaatcttgtaaaacagttttggttgtcaaattctcaccgcacatggtatgattgtaccatatccgcagaatggatatggcaccctttccgaacttgcgccgctgtatcagcctgtccagccgcacaatcgccgcattgcggttattgtaccacatccggcgccaacttcccaccccctgtacaaaaattttgaaagtctcttgactttcccccgggtggaaggtgtaccctgtccccagagatgaggtgtaatcccttgaaaatcaatgaagtggaagccctggtgggcatcacgcggaagaacatccgcttttatgaggcggagggactgctctcccccggcggaacagccagaacggttaccgggactatggggagactgaggtggaggtcctgcggcggatcaagctgcttcggaagctgggccttccgctggaggagatccggcagatgcagcacggcgcctacaccgtgggggacggtatgcgccgccatctggtgtccctggagcgggagcggcagaatctggaagcggccatccgcttctgcgggacgctcacagaccgcagggagcggctggaggagctggacgcccagtccctgctggatcggatggcccagatggaacaggagggaacgacctttatgaacaagcagaagcaggacaccaggcgccgccgcttcgtggcgcccatcgtggtcgccatcgtcatgtcagtcctgatggcggggctgatctggctcttcctctgggctttcgaggtggatccggccggtgcgccgcccctgccggtgctggcgctctttgtggccatcccggcggcagtggtggtcggtgtggtcatcgccctggtccagcgggtccgggagattgagcggggagaggaagacgatgcgcggaactactgagcggcgggattgtcgacaagcagcggtgtccgccgcagggacggccgtatggctgctggctgcggccgcggtgttgctgtgggtgcggcaggcctttttccccagcggtgcggcatccgttctgctggcggttctggccgctgtccaggcagcagggctgatcccgctggggctggccctgcgggaccgcttgaaagagatcaaaggaggagaattatatgaagctcgtcagtattgagaccattcccggccaggaatttgaggccctggacatcgtgcggggcacggtggtgtacagcaaaaacttcggccgcgatttcatggccggtatgaagaccctggtgggcggagagatcaccggctacaccgagatgctggtggaggcccggcagatcgccaccaagcgcatggtggacgcggcagaggctctgggagccgacgcagtggtgggcctgcggtacgcctctgcctccgtgatgcaggggcggcggaggtcattgcctacggaacggctgtaaagttcaaatgatgcacgtcacctttctggaccacagcggctttctggtggagctgcccggtctcacgctgctctttgactggtggaagggggacctgccccccctgccatcaggccccctgctggtctttgccagccatcgccatccagaccactttgatccccggatttttgctctggatgacgggcagcgggatgtccgattccttcttggcaagggcatccatctgacagaccggaaccggaagaaatggggactctcggaaaaagccgccgcggactgccgggtgctttccggcggggagagcgcctctcccctgcccggcgtcaccgtggaggcactgccctccaccgacgagggcgtggcctttctggtgacggcggaaggccggacggtctttcatgccggggatctgaactggtggcactgggagggcgaggaccccgtctggaaccggaacatggaagcggacttccggcggtatgcggaacctctccggggccggaagatcgatctggccatgctgcctctggatccccgtctgggggaggacggcttccgtggcccccggtacttcctggagctggcggatatccgccgctttctgcccatgcaccagtggggaaattttaactttacaaatcaattcctgtcatgctatacttctttcacatcccgaactgtgtacgttaacagagtcggtcaagtctttacatttgaggaggaagcggacacatgaagatcgatggcaatgaacttgcaattgagcaaaacgagctggaccgggagggccgccatgcggaagccatggccatcaagcgggaatttctgaagcaggtgcgggagagcggtgaccactgcccctgcaagcaggcctgccctcaccacggcaactgctttgagtgcgtgacgctgcaccgtggtcaccgggatcacttgcccatgtgtatgtgggatatggtgaatgaacggctccataagctctcccgattgacagaggggaccctgcggtcctatgaggaggcgcaccgctgaggaagctccagaaaagcgcccgtgccaatcggcacgggcgctctcctcttcatctgtcttcaatctgcaaggatcaggcagctgccggtcacatcagggctgtggcccgttagctccgccacgaagtccgtgtcctcaccggcggcactgaccgccgcttccagcgcggggatctggtcaaccgtggtgacggcgtagactcggtccaccagcggggcgatatccgagagtaccaggccggcagtgtcgtcggcgccggaggtgatgacctccggcggcagctcaatggagacagccacaccatactcacccagagcgctgcgcagctcctccaggaacagccggatgctggccgcccggtcggcgccgttgtagtcgatcttgtccagcttccctactgtgggatagcccacatccgttagcaggatttcatcaaaaccctgttgtgccagctccgccgccagggtgcacaggtactgccgggccgccggcttgctgggatccagccagtttccgttgttcccgtcgtagaagatatagccgccggtgttcttcagtcccatgccctccacgtccgcgcgggcggcaatggggtccaggaagcagctcatccgggcgatggagtggtaactgctttccgtcacctccgccagagccgccgccgtgtcctccgccgtgctcacggtgccggccgcggcgccagtggcagcaaagtagatgtgtccggtgctgtctttcagcgtgacggcagcagcgttataggcgggagcagacatcacagaggctcccagccaggcatctttccagcccgcctgggtcagcggcgcggcggaagcagagaaggcagccagagccttcggcttctccggctcctgaatggtaatctctacgtcctctgggggcacttcctcttccgcggggggcgtctccgtcttccatggcaactccaggtggaagctgccgtccctatcgtagacgatatactcctgcagccatagaaagcccaccgccgccaggatgatgagcaccagcagcactgccagcgcgatcttccccttggaggtcctgccccggtagctccggtagcccttggtgcctcccatgtccgtcacctcttctccaggagattgcccctgcccgtcagggctggatggcgttgagcttgttcacgcgccgctcatgccggccaccctcaaagtccgtggagaggaacacctccaccatccgctccgccaggttcttgccggtgaaccccgcgccgatggccagcatattggcgtcgttgtggcggcgggtcatctccgcctccagggagtcggcacagtgggcgcagcggataccctgcaccttgttggcggcaatggagatgccgatgccggtggtgcagatgacgatgccccgatcatactcgccggaggccacagcccgggccgccgcctcgccgaagtcggggtagtcgcagctctccgtcgagtagcagccgaagtccttgtattcatggcccagcttctccagaagctggatgatgtcgcatttcagcgcgtagccgccgtgatcagaacccagagcgattttcatggtgatcgttctccttttcaaatcaagtcatcccattcggagaggaatggggctggaatggatttattatagccagttttcccctgaaaagcaaatcacaattcatgccacaccggtttcccctgccggaaggcggcaaaacggcggaatccgcaggcccgcagcagcgcctgcccctcccggacggcacagcccacaaaccccggcgtgtgggcatccgtccccagggtgacgatctcgccgcccagggagcggtacagccgcagccacttttcgtccggcagcggggtgttgccccggttggtgttgagctcgatcccgatgcccttggggatgatgaggcggaagatctccgcgatctcctcctcgaacccgtcgaagctgacatgcatcccccggttctcgttcaaataccgcaggggcagcgtcagatggcccagtacctggaatcgcccccactccgcgagcttccgcacctggcccaggtagtcggcaaggcagtcccgcgcttcctgttcatcccgcggggtaaggaaatacaggtcccggccctccatcttctccgacagggtgtggatggagccgatgagaaagtccagcggcggggcctccgccagcatggactccatccgcctgatgccccacacggcgtctcccagctccgcgcccaggcgcaacgtgatccggtcccccaccgccgtccgggcggcgcggaactccgcaatcatgggatcccagtcataggcccccggggttcggtggtgccgaaccggatgggctccacatggtctgtgaagcagatctcctggaaccccagccggatggccgcctccgccatctcctgcatggaggcggaggcgtccggtgagatgcgggagtggacgtggtagtcggctaaatacatacgtgcctcactttttgaacttcttgaagaacttcttctgctcctcgtaattgctctcgcccatggtctcggcgaacttcttcagcgcttccttctgctccttgttcagatttttgggggtttcaatgtagacggtgacatactggtcgccccgccccggccgttgatggaggggatgcccttgcccttcaggcggaaggtggtgccggactgggtgccctccggcagggtatacttcactttgccgtcgatggtggggatctccagctccgcacccagcaccgcctgggtgaaggtgatgggcgcctcgcacaggacggaggtgccctcccgccggaacagctcgtgaggccggaccgtaatggtaatcagcaggtcgcctgccgggccgccgttcttgccggcgttgccctgtccacggatggagatggtctgcccgttgtcgatgccggcgggaatgctggcctgaatggtctttttcttgcgcaccataccactgccccggcagtccttgcagggctggtggataatccgccccttgccgccgcacttggggcagggggaggaggtggcgaacacgcccatgggcgtctgccgccggacctggaccgtcccggtgccgtggcagtccgggcacacctccggcgacgtgccgggggcacagccgttgccgtggcaggtgtcgcaggtctcataccgctccacggtgactgccttctcacagccgaaggccgcctcctcgaagctgatggcgatggacatgcggatgctctcgccccgctggggggcgttgggattggtgcgccgcccgccgccgaagccgccgccgaaaaagctgccgaagatgtcccccaggtcgccgaagtcgaagctcccgtcgaatccgccgccgaagcccccggcgccgaagttggggtcaacgcccgcatggccgtactggtcgtaccgggccttcttgtccgcgtcggagaggacctcataggcctcgttgacctccttgaacttctcctccgccgtcttgtccccggattcaggtccgggtgatacttccgggccatttttttataggcctttttgatctcatcctcagaggctcccgggaaacccccaggacctcgtaataatcgcgtttctgttctgccatagaatcaccaacttttcaattaggaatggggagttaggaattaggaattgtggaatccgctcccggcggatgaattgaaatccgtccggctccgccggacacctcaattccttattcctgatttctaattcctaattcatgagagcgtgccgcgcaggcgggggtgtccccgcccgcgcggccgcatggcatctgatcacttcttgttattctcgtcatcgtcgaccaccttgtagtcggcgtcataatactggccctgctgggcgccggcgtcggggccggcctgctgctgggcgccgccctgggccccctggggattggcctgctgatacagcttctcgctgacggcgtagaaggcctgggtcaactcgtcggtagcggtcttgatggcagcggtatccgtgcctttcagaacctccttcagtttgtcgattccggcctggaccttgctcttgtcatcggcagggatcttgtcgcccatctcggagagggtcttctcgctctggtagaccatctggtcggcctggttgcggacctcgacctcctccttcagcttcttgtcctgggcagcatactgctcggcctccttgacggccttctcaatgtcctccttgctcatgttggaggaggaagtgatggtgatatgctgctccttgccggtgcccaggtccttggcggagacgttgacgatgccgttggcgtcgatgtcgaaagtcacctcgatctggggcacgccgcggcgggccggagcgatgccgtccaggtggaagcggcccagagacttgttggccgcggccatctcccgctcgccctggaggacgttgacctccacgctggtctggttgtcagcggcggtggagaagatctggctcttcttcacggggatggtggtgttccggtcgatcagcttggtgaacacgccgcccatggtctcaatgcccagggacaggggtgtgacatccagcagcagcagccccttcacgtcgccggtgaggacgcccgcctgcagggcggcgcccatggccacgcactcgtcggggttgatgcccttgaagggctcgttgccggtgaagttcttcacggcctcctgcacggcggggatccggctggagccgcccaccagcaggaccttgctcaggtcactgggcttcaggcccgcgtcggacatggcctggcgcacggggcccatggtggcgtccaccagatgggcggtcagctcgttgaacttggcccgggacagggtcacgtccaggtgcttggggccgttggcgtcggcggtgatatagggcaggttgatgttgctggtggtgacgccggagagctcgatcttggccttctcggcggcctccttcagccgctgcatagccactcggtcggtggacaggtccacgccgtcggtgcgcttgaactcgctgaccagccacttcatgatgcactcgtcgaagtcatcgccgcccaggcggttgttaccggcggtggccaggacctcgatcacgccgtcgtcgatgtccaggatggacacatcgaacgtgccgccgcccaggtcgtacaccatgatcttctggctctgttccttatccacgccgtaggccagggccgcggcggtaggttcgttgatgatgcgtttcacgtccaggccggcgatcctgccggcgtccttggtggcctggcgctgggagtcagtgaagtaggcgggaaccgtgatgaccgcctcggtgactgtgctacccagataggcctcagcgtccgccttcagcttctggaggatcatggcgctgatctcctgggggtgtagctcttgctgtcaatggtcactttataatcgctgcccatctcccgcttgatggaagagatggtgcggtccggattggtaatggcctggcgtttagccacttgacccaccatgcgctcgccggtcttggagaaagccaccacggacggggtggtccggttgccctccgcattggggatgaccacagcctcgccgccctccatgacggccacacagctatttgtcgtacctaagtcgataccgataaccttagacataatgattgcctccaatttatgatcaaataattctatctcaacaaataaaaatttgcgattgttgttttcattcacgccaggcgaatccattgcaatgatttgtcaggatatatgcctgacaaaaacacgttggctcgtgcgccttgggcgcacacgccagtggccgatgtccctggtgcgggggaaggtcgaggggggacacagtccccctctcgaattcgctcagtttgccacctgcacaatagcgtgtcggatcaccttgtcacccagcaggaaccccgcctggaacacctgggataccacgttctccccaaggttctcatcatcgatgtgcataacggcgttgtgcttttccgggtcaaatggctggccctgggcctcgatctccgtgactcccagcttcttcaggatctcctggtactggtggaagatcatctccagccccttcttgtggggagagtcctcatcgccctcagtggccacagcccgctccaggttgtcgtacaccgccaggaactccttgatggtgtccgccttggcgtcctggtagagattgtctttctccttagcggtgcgcttgcggtagttgtcgtactctgccgtcagccggacgaactgatccttcacggactccagctgccgggcggccagctccgccgcctccatctgctcccgggtcagggtgtaggtcttttcctttttcttcttgcccctggcggccttctccgccttctcatcgggcaccttctcctccgcgggggagcctcttcctgaggagcctcctgcggctcttccggcgtctcctccgccggctgcttcgtctcttcgctcattcttttgcatcctccttcgggggtaattcctgtttgccgaacagccgcgtcaatccctccgcaaagccggagagccgggcggccacggttccgtaatccattcgtgtgggtcccaccacgccgatcaggccccgcatgtcgttgccgatgtcatagctggccaccaccacactggtgtcctgcagggcctcgctgacattctccggaccgatcaggatcttcatgggcccctcgtccggcacagggagattctccttgctgtcggacaaaaagctcatcagctggtgggccttgtctgcgtcccggaactccggcagcttcagcagttggctggtgcccacggtaaacacctctttctgccccgcctcctgcagcacatccgccgcgtaggcgatggtctggctcaacagcaggaacatctggggcgtcacctgttcggacacatccatcagccgccggttcatctcgtctgcggagatcccggtgaagttgctgttcagcaggttcaccagggtgggcatctgctcggtgtccaccttcagctgcatccgcagcagctggctcttcacccggttgtcgcccatcatcatgaccacgatgcagctgtgctcatccacgggcaacagctcaaaccgccgggcggtcatctgcttcttgccggtggcggccacataggcggggtagttcatcagagaactcaccgcccggcccgcctgggagatcacccggtccagctcctccatccgcatctggagggactggttgatccgctccgtctctgcgatggagagccgctggcgctccatcagttcgttgacatacagccggtaacccttgggagagggcacccgcccggcggaggtgtggggctgttccagatagcccagctccgtcagatccgacagctcgttgcgaatggtggcggagctgacgccgcccatctccgcggcaatggccttggaacccaccggctctgcagtacggacatagtcctccaccaccactttcagtatttgctttttccggtccgtgagttccacaaaaagcacctctggtccaagctgtctcacgctggttttagcactcctttctccggagtgctaaaacgagtttaccaccacgcgccttcattgtcaacggatggatataaacaaattgtaaacaaatgccatcggatttttgaacattttccgcggctccgcaaatcaaaaaccggccgcctgccgcggccggtttttcgtctcacatggtccccctgtccgctcagtccggcctggcccccgccccctgccggggcagcatccccgtccgctgaagggccggctgcagcgcccgcagcagaagcaccagcagcaccgtctgcaccggcagcatgatgaggtttttcaccgcgctgagagacgcgctggcataccaggcctccaggctgaagcggccgttgctgttgagaatggcgatccacagcgcccccagcaccacgttctgcacattggtgaccagcttggcgcagaagatccgccagacccgcaggggcgcccggtacaggaacagagcgtaggtcagcacacccagcatagtggtcagagtatagccggggaaaaagggatagccgcctcctccagtgaggaagaagctgaggatgtcctccgcaaaggcgaacagcaggcccagcaccgggccgcagacccaggcacagacggaccgggccaggaagccccaggtgaccttggccccgccgaacagcggcaccgagggcacttgggccagcacaatgcacagggcgatcatcagggcggagaacagcagcttccgaaggtcccggacctcccgggacgcgtcccgccagtagtcggcggaaaagggatgtgcgtacataaaaaacctccttctgttttggcagtccgaaattcggagatgccgcacagaggaaggccgaaagggtccctgtatgcggcagcgggatgcgggacacacactgcggactcgcggtcctttcgtccgaagagcaactccccgtctctccagcactggatgtacacgtatgtccctactctgcctgttagatattgtccattataggactttcgcggaaaaaagcaagggtttccgccgtttttccagcacaccttgcggcaatccggtccatgtgttaagatgaccgcaacccgaataggagaggaggcgatccgcagatggttcttttgattaccggcgcctcgcacacaggcaaaaccctgctggcccagagacttcttcagacataccgctgtccctgtctctccatggatcttctgaaaatgggacttatccgaagcggcaacacccgcctcacgccggaggatgaccaggagctggagtcctatctgtggccgattgtgcgggagatcatcaaaaccgccattgaaaaccgccaggatctgatcgtggagggctgttatgtccccccacgctggagtcaggactttacgccgtcctatctccgggaaatccgcttttgctgccttgtgatgaccaaggcatatatcgagacccattttgcagacatacaaaaatatgcctgtgcggcagagcggcgcattgacgattccacctgtacgaaagagactctcctcctggataacgcgcactatcagcagatgtgcgagacctgggggtatccctgtattctgatcgatcaggcgtacgaggtggatatccccctgtgaaaaaacgatcccggccctttcggccgggatcgttttttcacttactctacgttactgggcagcgccagcggtctccgcagccttcgcggcagcggccttctccgcctgggccttcttgatggccttgtacttctccttctcctccgcggtggcgatgggaaggatggcgtcccgcgggcagaccttggtgcagagcttgcagcccacgcacttgtcgtagtcgatgacagccacgccgttcaccacatgaatggcgtccttcttgcactccttctggcacaggccgcagccgatgcaggagtgagtgcagacgctcatggcagccttgcccttgtcctggttggcgcaggccacgtggaccttcttggacacagggacctccgtgatcagatggcgggggcaggccttggcgcaggccatgcagtcggtgcacttgtccgggtccaccacggcggcgccgttgggaccgatggacatggcgccgaactggcaggcggacacgcaggagccgaagcccagacagccgaactggcactccaggggaccaccggccaccttggtggcggacaggcagtccttcacaccgacgtactcataacgcttggcggcgttggtgccgccgttgcagcggacaaaagccaccttccgctcaccggagggagcctcctggcccatgatctttgcgatggcggcagcattctccgcgccggcaggggcgcacgcattcaccggagccgtgcccgccaggatggcggcggcacagccggcgcagccggggaagccgcagccgccgcagttggcgccggccagatggctgaggatttcctcttcccgggggtccttctttacctcaaagaccttggaggctactgccaagatgaagccgaacacggcgccgaggacagccagcaccacaacggcagcaatgacatttccgatatccattttcctcttgcctcctcttaccagaccttcaaaccggagaagcccataaacgccagggccatcagaccagcggtgaccagggcgatgggaaagccctcaaacgccttgggatagtccgcaaacaccagccgctcccgaatgctggcgaacagcacgatggccagcaggaagcccaggccgccggtgatgccgtaaactacggaggagatgaagttatagttgttctgcacgttcagcagcaccacacccagtacggcgcagttggtggtaatcaggggcagatacacacccagagccgtgtacagagacggcatggatttctgtaaaaacatctccacgaactggaccagggatgcgatgaccagaatgaaggtcacggtctgcatatactccagtccaaagcgaaccaggacgaactcgttgaccgcatagcacacggcggaagccagtcccatgacgaacgtcacagcgatgcccatgcccacagcggtgtccaccttcttggaaacacccaggaaggggcagatgcctaagaactgggagaagatgaagttgtttgccagaatggcacccagcgtaattgccaggagttcatagatttgatccattatttgctctcctccttatttttcttaggtctggacagcgcccactgcatcagggcaatgaggcagcccagcaccaggaagccgccgacgggcagggtcagcatgccgatggggaactgctccggcaggatctgaataccatcgccgccgttgaggataccgccgccgaaggtgccggcgcccagaaactcacggatgatgcacataaccatcagcaccacagtgtagccaaagccctggaagataccgtcccagaaggaagcggccacaccgttcttgtaggagaaggactccgcccggcccaggatgatgcagttcaccacgatcagggggatgaacacgcccagcgactcggacagggccggaacgaatgcctggatcagcagatccacgcaggtcacgaagccagcgatcaccacaatgaacatggcgatacggatcttgtccggcacgatcttgcggatagccgcgatgatgacattggaaagggtcaggatgacggtgaccgccacgcccatgcccaggccgttgaagaacgaggtggtgatggccatggtggaacacatgcccagcacctgcaccagcacagggttgttggtgatcagtccctctttgaactgtttgcctaaattcatgaattgctcctcccttctcagcccatggcagccacggcagccagcgccgcattcacgccggcagtcacacccttggtggagacggtggcgccggtgatggcgtccacgttagtgcccaccgtcagagtgccgtccgccgcgctcttgccgataaactggtccagcacacccacgccggaggcggtgggttcgttgcccacgaccttcgtgccgatgccggaggtctcagagtggttgacgacagaaacgccagtgacggcgccttccgcgtccacgcccaccatcatttcaatgctgccctgggagccggaggcggtgacctttacggcatagccggcggcctcgccgttcacctggacctcgtacatctcgttcagggtgccgccggcagctgtggccgcagcggtcatgtcgccagacagttccagcgcgtcggagaaggtggtgttgtccggatcggacaccacggccagcatggccgcttcagtcttctgctggttgatctcagcgatggggccggccgtcacaccgttgaccagacccagcagcagtgccacgatcaggcaggtccccagcagggtcacagtcagctttacgatgtacttggggtccatatcaatcttttctttggtcttgacttcgttgctcatttcgcagccgcctccttgttagcggatttcacaacgccgaagcgagagggcttcacagccttgtcgatcagcgccactaccaggttcataatcatgatggagtagcacacgccctcgggataggagccgaagtagcggatgaacaccgtcagcaggccgcagcccaggccgaagatcagctggccggtcttggtgacgggggaggtggtgtagtcagtggccatgaagaaggcacccagcatcaggccgccgccgaagatgctgtacagcatgaactgcagattgtcggcgccgcccttggggaacaggaaggtcagcacggccacggtggcgatgtaggccgcgggggtctgccagctgatgaccttgcgccagatcagatacgctccgcccacgatcagcagcagggcggagatctcgcccagggagccgccgatattgcccaggaacatatccgtcacgctgtactggctggtgaggccggccatgtcgccggtcttcatataggccagaggcgtggcagcggtaaccacgtcggcagtgccggccaggggcacccagccggcctggggatccgcccaggcgccgctcatggtgccggcatagctggccaccagggcggcacggcccgccagcgcggggttgacgaagttcttgccgatgccgccgaacagctgcttgaccaccacgatggcgaagaagtcgcccaccaggatcatccagtagggcatgttcaccgggcacacgaacgccagcaggatgccggtaaccgcggcggagagatcgttcacggactggggcttcttcatgagcttgcgatagccccactcaaagaacatgcagcccaccacggacacggcagtcagagtcagggcccggaagccgaacttcacaatggcccagatcagggcgggcatcatggcgatgataacatccagcatgatggagcgggtgttctccgccgcccggatgtggggagaagaagtggcaatcagtttgagattcttgtagtcagtcatttcgcagcggcctcctttgcttcttcggcctttttctttgcctcggcggcagcccggtcagcggccgccttgtccttcaccagctgcttgccggttttgaacatatgggtcaggtgcatccgggccgggcagatgtaggagcaggcgccgcactccatgcagtccatgatgtgggcgtcattcagctcctccaccatgcccttggaggcatactggtacatgaacaggggctccaggtgcatcgggcagacggacacgcacttgccgcagcggatgcactggggattctccacggtcttctcctcgttctcgcagaaggccaggatggcgccggtgcccttggccacggagatgtccgcggtgtactgggccatgcccatcatggggccgccggcgatcagtttgtatgtaccgtccttcaggccgccgcaggcgtccaacaggctggagacgggggtgccgatggggcactccaagttcttgggctccaccacgccggagccggagacggtgacgatcttgcgcaccacgggcataccggtggtcagggcccggtagatggcgcatgtggtgttgatgttgaatacggcgcagccgatatcggcgggcagtccgccgggggcacctggcggccggtgatggcctggcagagctgtttctcaccgccctgggggtagcggcagcgcaggggctccaccaccacgggggccttctgctcggcaatgaccttgttcatggcgtcgatgccgttgcgcttgttgtcctccacgccgatgacgaccttgtccacgccgaacatcttggccaggaacttggcgccgccaatgatctcctcgggccgctccagcatggtgcggtggtcgcccgtgatgtagggctcgcactccgcgccattgatgatgacggtgttcaccttgccgatgccgctggtgatcttcacgtgggtggggaacgtagcgccgcccatgccgacgatgccggcgttcttgacgatctccaccatctcctccacgctgagggcattgggatccgcgggggcctggacctcttcgctcacctcgtcctgcatgtcgttttcaatgaccacagacgtgatgttgccgcccatggaataggggcggggttccactgccttcaccgtgccggaaacgctggcgtggatcggggcgcccaatccgtggaattcgccgatcttctggcccaccttcacgtggtccccggccttgaccaggggcgtgcagggcgcgccaaagtgcatcgacatggggatgaccacaacagccggcggagccagctgctcgatggccttttcattggttgcggccttcatatcatggggatgaacgccgccaaagaaagcttgtgccattgtcttcacctcatttttactccttgatagtcggcccgggcaggagggcacggcccctccccttcccaagagagggggtctccaggcaggcgacactatcacatactgcgcctcattctacacctatttttgaaaaatgtccagactgtgaacgacaacttttgaaaaaaatatgcttctttatacagaatctttgcaacttttcacacgttttatccagttctgtcattccctcccatttttacgccgtctcttgttatttcagaagaaacatgatatgcttggtgatacgggtccggctccggccgccccattttcaaattatctggaggccaagacatattatgatggcacaactgatcgaccgaaagcatctgaagcaggagatgaaggagctgctgcgctccgcccaggtcagcccccgcgggatgacctgcctgtacctggccctggtgctggtgctgaacctggcggacagcttcatgggtcttatgaatccgggcctgctgggcaccttcatctccatcctcaccggcctgatgagcatggtcctggcctccggcttcgtgatgtactgcatggccatccgccggggcgagcgggcggaatacctgacgctgttcgacgggttctcctttgtgggcaaggtcatcctgctgaacatcgtgatctacctcttcacgttcttctggtcactgctgttcgtcattccaggcatcatcgccgcctaccgctaccgcttcgccctgtacaacctctatgagaaccccggcatcggggtgatggaggccctgaacatgagcaagcagcagactcttggctacaaggggcagctgttcatgctggatctgagctatatcggctggctcctcctggcgtccctcacctccgtcgtgcagacgggctatatctacgcctgcattttccaggaccccggctactatttggcgaaccccgcccaggtctatgccatcaccctgcccatgcccgtaggattgcaggtggtgctgggctgtgtctggccgctgctggtggcgttgttctacctaccggtctaccagtgcacggagcttggctattttgacaccgccaagcacacttccggcgtgggagagggcgcggcccccaaggatcccggcagctttgacagcggctggggaggcttctgagcgccccattaagcctacaagcccccggcgggttttagaacccgctgggggcctctctttcaggagacctcgcctgcgggccgggccgggggctctgcgccatccggcctccttccggggtccgcctccgcgccaagggccccctccacaagcatctttcagattctccctcagacgcaaagctcccccggcgggccaaaggcccgccgggggagctttcttccatgttgcggggatcacagccgggggaactcccgccggacgtaggcgctgcggcccagagccgccgccagcagtgtggaggcggcgatgccgaaggcagcctgcaccagattgctggggatacctgccgcggcaccagccgcgctccccagcagcagggcgtcgtacagccagtagcccaccaccatgggcagctctcccatgatgccgcaggccgcaaggcccaggggaccccgtccctttccgaacgcctgatggcacgcggccgccaaagccgccatccctgccttgatgaccagggtagcgggtgcgtagatgggcgagcccagcagcacatccgccagggccgggccgatgctgcccgccagggcgccccaggctggccccagcagatatccgcccagcagcaccaccgtgtcccccaggttcatgtagccgccggtgggggacggcaccttcaccaccatagtggccacgcaggccagcgccgcaaaggccgccgccatcacgaccatccgtgtccgctggaaggtcttggccgtctcctgctccgctgtcttctccatatcctcttctccttccggcggggccgtctcgcgccccatttgctgttgccatcatagaacaaatatgatatgattaaaagcgtcaatttctgaattttttatcaggtcagatggaggaagcccatgcgtacctacgccctggaaaaccgcggcagagcgccgctgtatgaatacctgtaccgctgcatccggggggacatcctggacggcaccctgacggccggggagcggctgccctccaagcgggccctggcggagcacctgcacatctccgtcatgacggtggagggggcctaccagcagctggaggcggagggctatgtgtacacccagcccaaacggggcttttttgtggcggaggtggagcggccccggcctgccgtccccgctcctccggctcctgaggcgccgccggaggccccggtctggcggctggatctgaagagcaaccaggtggacgccagccgcttccccgcggcggcctgggcccgtctgacccggcaggtgctgtccgaggacggggaagccctgctgcgcccagtgccccaccaggggctgcccgccctgcggcaggccatcgcccgggacctgcgggagtataagggcatggctgtgccgccggagcagatcgtggtgggggccggggcggagtacctgtatctgctgctggctcagctgctgggacgggaggccgtctttgccgtggaggatccgggctatcccaaaatccgccaggtgtacggcaagtgcggcgcggcttgccgcccggtgcccctggacggccagggcgttcccccggaggccctggaggcggcgggagccagtgtggtccatctctctcccgcccaccactatcccaccggactggtgacacccatcggccggcggcaggccctgctccgctgggctgagaaggctggaggcatcatcatcgaggatgactatgacagcgagttccgctttacaggccgtcccattcccaccctccagagtatcgacaccgccgggcgggtggtatacatgaacaccttctcccagaccatctccccctccatgcgggtgggattcatggtgctgccgccccgcctgctggagcagtaccgccgggagctggatttttattcctgcacggtgcccgccctggaccagcacgtgctggcccggttcctggaccagggccactacgagcagcacctggctcggatgcgcaaggagtaccgcacccgtcacgacgcggttctggcctccttccggtccagccccttccggaaccggatcacgatctcggagcagggggcggggctccactttctcctgcggctggacacccgggagagcgacggggccctgcgggaccgggctgcggccctgggcgtccggctgggctttctctcggagtacgccgccatcccctcccctgcctacgcccacacgctggtggtgaactatgccggcctcagcccggcggcgctgccagaggccatggacctgctggcggagatcttcggggcctgatgcctgccgtccactcccccgcgcaaaaaagccggccgccccaagggcggccggctctctgcatcgggttttcagttcacacgccgggctttccctccagcgcggtcatgctctttttgaaatggacagcgaacatggtggctgtggtacacaccgccaggaaatccgccaccggctccgccagaaagaccgcaaaagccttatccgcaaaaaagttgggcagaatataaatgaagggaatcagcaggatgatcttccgcagcactgccaggaacaaggagatcttggcgttgcccagggccacgaaagtctgctgacaggcgatctggatgccgaagatcccggtggccgccatgtagatccgcagggcccaggaggcatagctcaccagctcgctgtccgaggtgaacatcagggcgaacagctgggggaacagctgcaccagcgcccacagcagcagggagtaggccaggcaggccatcagcagcacctggaaggcacgccgtacccgccccggattccgggcgccgtagttgtagctgatgatgggctgggccccttgggtcaggccctggaggggcatcatggcgaactgcatgatgctggagagcacggtcatagcacccacagcgatgtccccgccgtatttcagcagtgaggagttgaagcacacggtaatgaggctctccgtagactgcatgatgaagggggaagcgcccagggccagggccggcagcaccaccttggcttggggccgcaggtgctcccgccgcaggtgccacttggtcttgctgcccgtaaggaacttcagcacccacaccgcggagaccgcttgggatagaatggtggccaaggccgcgccccggacccccatgccgaaggcgaagatgaagatggggtccagcaccgtattgaggatcgcgccgatcagcacagtcttcatgcccaccaccgtgaagccctgggcggtgatataggcgttcatgcccagggtcacctggacgaagatggtgcccagggcataaatgcgcatatagttcagggcgtagccgatggtgttgtcgctggcgccgaagatgcggagcatgggctccgcaaacaccagaaagaccacagtcagcaccacggacaccgccaccagcatggtgaagctgttgcccatgatccgctccgactctttcaggtctccccgcccttcggcgatggaggcccggggtgcgccgccgaaggccatcagggccgcgaaggcggagatcaccatgatgatgggcaggcacacccccacgccggtgagggccagcttgcccacagtctccaccggctgcatgtggccgatgtacacccggtccaccagattgtacagcatgttgacgatctgggaggtgatggtaggaacggccagggaaaacagcagctttcccacgctcccgctgcccaggtccacatttcgacggctcatgtattgcctccttccttcaaccgcacttccgcgctggtcagaaccttttccagcagttcctgaaatcgctccgcctccgactgtgtcagaccggcaaacagcgcgtccaggcaggtactctggagcttctgcccctcccgggccagggccgcgcccgcatctgtcagcgccagatggatcacccggcggtctgccttgtccggctgacggcggagcagctcccgcgccgccagcaggtccaccgcggcggacacctggctcttggccagtccccggagctctgtcacgtcccgggcagtgtcatgtgccggatgattggccagaaacagcaccacatgaatctcccgcatggagagcccggtgcgggacagaagctctgagaaatgcctatcgtaataccggcggaactgctggataacccgcagcagctgcgtactgctcactgccacagcgcccgccccctttcattttatttaaaacagttcttataagaactgttccagcatagcactattttttccgcctgtcaagatttccgaatccatccttgacaattctcccttcctccagtatgatggtggcagaagatatcgtttttaaaatcagatttcggggtgttctttatgacatggaatattgtgagcgacagcagctgcgacctgcggacagcttccttccacagcagctgcgtccggtttgagaccgtgcctctgcgcatccaggtgggcggccgggaatttgtggacgatgacgccctgtcggttcccgccctgctctccgccatggcggtggagaaggctgcctcctcgtccgcctgcccctcccccgccgactttgccggggcctttgagcggggggaccgtaccgtctgcttcacgctttcctcccagctctccggcacgtatcacgcggcctgcatcgcccgggagatggtgctggaggagcacccggaaaagcagatctgcgtcatcgactcccgcgccgccgccgggaccatggtgctgctgatccgccgggcccaggccctgatggaggcagcgggggatgatggggacttcgacgctctctgccagcagctccaccgctatcaggccaccctgcggacctgcttcaccctggagaatttcgacaaccttatcaaaaatggccggatgcggcccattgtgggcacgttgctccgctccctgggcatccacatcattgcggacgccacagccgagggcaccattcatgtggcggataaggcccggggcgtgggtaagacctaccgggccatcaccgccctgatgaaggccagcaaggactgcaccgacgcagaggtggtaatctcccactgtgagaacctggagggtgctatggccctgaagcggcagatcctggcagacctgccggtgaaacaggtggacctgctgtcctgccggggactcaccagcttctatgccatggaaaagggcctcatcgtggggtactgaggtacgtccttccccatcaggcgcctccgcggaaggccgcttccggaacagcagtcagccgccggaaccgccatcttccggcatttggatatggcaaaaaagcgcgcacggaaaaccgtgcgcgctttgctttttctatcccagcagcacacccgccaccaggaacgccagggccagcagcaaaaaccagagtatcagcttccacacatacttcacccagcggtcgtagggcacatggcccagggccagggcgcccatcaccaccgccgcagtaggggtgatgatgttcaccaggccggaggcggactggaacgctgtcaccaccagatcgccgcccaccccggcgaatttgcccaggggcgccacaatggggatggacagtgtcgccaggcccgacgaggacgggatcaggatggtgaggggcaggtacagggcgaacaccagcagcgtgaagctgatggccccggcgccggaaagggcctgctctccccagtggaggaccgtgtcggtgatggcgccgtcgttcatcagcacagtgatgccccggctgatgccgatgataaaggccacgcctaaaaggtccgcgcagccggccacgtaggtctctaccagctcctcctcactcatccggtcaatgaggccgatgacgacacctgccaccaagaacagggcggagagctccggaaaccaccagcccagagcgggcagggacaggcccatctcgtcaaagggcaccacagcatagaccatgatgaggaatgtcagcgtaaagagggccatgatgaccttccgcttggcggtaaagggcacctgctggtccatgcttacctggatcttgcccgcgcccacgcccaccacggatttggaggggttcttcttgaccttcgcggcgtaggccatcacaaaccagatggccgccgcctcaaaggccacccactccagcagccgcagcacgataccctctcccagagagaccccggcaaagcccgcggcgatgccggtggcaaaggggtttaccgtggaggcgatgacgccggccccggcccccagcaggatcacgctgatgcccactaccgcgtcgtacccggccgccaggaacaccgggatcagcaggggataaaaggccatggtctcctcccacatgccgtaggtggtgccgcccaagccgaacagcagcatcagaatggggatcagccacttctcccggccgcccagcaggcggatgacgttgcccacgccggcgtccacggcaccggtcttcatcaccacgcccagaaagccgcccaccatcaggatgaagatgcacacgtccaccgcgtcgtaaaagccagaaaaagctgccttcagaacgtcgcccactccctggggattctgctccaccgtgtggtacgtccccgccaccggcacgccgtccacgtagtcatagctgcccgccgggatgatccaggtggcggcagccaccaggatcagcagcaggaacaggatcgtataggctgtgggcatgtggaattttttttgattcaagatatctaccccgcttctgttttgacgccgcggcgtcaacatcatttccatcatgtttgccggcagcacgcgtgtcggcaaacatccttcccagctatcaagtgtgcaagcgaagcgagtacatgcagatagctgtaaacgctctcacgaaaaaggcggcgccttttccatgaattatcttccgatggtggccaccagcacagctttgatggagtgcatccggttctccgcctcgtcgaataccacactgtggcggctgcggaacacctcgtcggtgacctcccggatgtccacgcccttgtcctgccactccttggccagcttggtctcaaagtcatggaaggagggcaggcagtgcagatacagcacgttggagttgccggtggccttcagtgtctcctccgtcacccggtagggagtcagcagcttggcccgctcggggatcaggtcctcctcgcccatggaagcccagatgtcgccgtagatcacgtccgcatccttcagggagttcatgttgtcggtgatctcgatgaggccgccgttctcccgtgcggtggcgaatacccgcttcaccagtgtgccgtccatctccttggccagctcctggggccccaggcccacaaaatgcatacccatcttggcggcgccgatcatccaggcgtagcacatattgttccgcacgtcgccggggaacaccaccttcacctggttcaggggcttgtggcagtgctcctcaatggtcatcatgtccgccaggatctgggtggggtggtctgcgtcggtgagaccgttccagacgggcacaccggcgtacttcgccagatcctccaccaccttctggtcgtagccccggtactcgatgccgtcgaaaaaccggcccagcactttggcggtgtcctccagagactccttcttgcccatctggctgctgccggcgtccagataggtgacgtggcccccctcctgggtagcagccacctcgaaggagcagcgggtgcgggtggaggtcttttcaaacagcagcacgatgtgcttgccctgaagggttgggtcgcagatgccggcccggcgcttggccttcaggtcgtggcccaggtccaggagataacggatctccgcgggggtgaagtcttccagagtcagaaaactccggcctttcaaattgattgccataaaatgcactcctttttatcttgttcatgatgaggactttttgaggggacagatgtggaccgccgaacaggggctgtgggggatactgctcccggcggaaaagaaaacatgtttcggcgggggaaggttggcgatcccttgcggcggtcagagagggaaacgtccggcccttgtgaacccctccagcccggggaagtccgggatacacgctgcgctgattttcgctgccgctggccggtggttaatgagagtttcagcatagggccaagctgcagcttctatgaccgccagggcagtgcgtagcgaagccgaacgcgcggaaggaggaaccagtggaacactgatgacggaaatccccggagcgccgtagcgcgagacaggaaaagcgaagcagttcaaatgcgtccttgcatcccggcaacttccgcaccatccgccacgggacggcagtcgagggaattgcagaagggcctagcgtgcccgaaggcaaggccaaatcggagcaggcaccgattcgccgcccccccttcagcgcggagggccactgcaccagagcgcatccaggcgcctttctctttggaccgtgcacggcccgtttctcttttggcaagaccgataaggggtcccgccgcgccccgcacggtggggagaggaggagcgcccaagcccacggagtgggcgcggaagtgcccttggggtgcaagggagcgggcgcagttttcgccgtacacggaaacggggctgagcggactttgcgacgacgacatgggggtgcatcccgctggacaagccctccctggccggggcggcccattcacgctccgcgaatgcttacggatcctcccgccacagcggcatggacatgcaccggggtccgccccgcccgcgggagagttctgcgctgggaatggtgtggagccggatgcccgcctcctccagggcccggttggtgacatagttccgggagtacaccaccacctcgccggggccgatggccagggtattggagccgtcgctccactgctcccgggcggcgtcgatctcgctgccctggccgcaggggatcagtgtcaccttatccagctccaggtgctccttcaggatgtcctccagccggccgtcctcctgacggattttcatcttccggttttcgtccagctccatgacgaacaccgtaatctgctggaggatgttgggatggacggtgaacttgtcccggtccaccatggtgaacaccgtatccaggtgcatgaaggaccggctcttgggaatgtcaaaggccagcagcttgcggaaggtcttgctctcggagagcaccgtctccgccaaggcgtcgatggagtcctcctccgtccgctgagagatgcccaccgccaacacctgaggggacaggatcaggatatcgcccccctccagggaggaggtctcgccccggtcgtaccacctgggggcgttgcggtagtccgggtggtgctcgaaaatgaacttgccgaacagggtctcccggtttctcgtggcggtgtgcattttgtggatggacacgccggtaccgatggtggcgaaggggtcccgggtaaaatagaggttgggcaggggatctacggcgaaggggtaatcatccccggcggcagagagatagtcccccagccgggcgctgtttgcccggagctgggacttgcggacgcccgccatcatggcagacaccatctccttgtccggcagggcagagaggaagtcctccaggctctcccggagccggtcgtccttgacgccggactcctccaggaactggcggatcaagtcggcccgcacgtcggcgtccgtgatggactccgccaccagatcccgcaggtagaccacctccactccttgctgccggaggcagtcggcaaaggcgtcgtgctcccgctgggcctccttcagataggggatgtcatcaaagagcagccgctccaaatactccggcatcagattttccagctcaccgccagggcggtggagaaggacctttttcagccgcccgatctcggaggtattgtgaattccggtttccaaaaagctcactcctttgttcatcggaaaggtacagggaaatcgctctggtttagggtctctggattttggcatttcatgcgccgttccgaaaaatccgcgcaaaaaaagaacggacgaatcgtccgttctccccacatgttctccgcaaaggccgcccgtccctccttcgggccgcggcgtctccccgccgcctccggggtcccgcggcatcggcagtggaaacgcaaaaacaggagagaggcttccgcctctctcctgctgttatctgtgcttgccgagatacgcctctttgatcttctcattggccagcagctccgcgccggtgccggacatggtgatgttccccgtctccagcacataggccaggtccgcgatcttcaaggccatgttggcgttctgttcgatcagcagtaccgtcacgccctggcggttgatctcccggatgatggagaagatgtcctgcaccaccagcggcgccaggcccagggacggctcatccagcatcatcagcttcggccgtgacatcagggcccggcccaccgccagcatctgctgttcgccgccggagagggtgccggcggactgccagttccgttcctccagccgggggaacagctcatagacccatttcaggtccttttcgatctccgctttgtccttgcggaggtaggctcccagcttcaggttctccagcaccgtcaggtccgcaaacacccgccgcccctccgggctcatggcgatgcccgcggagatgatcttgtcgatgggcttgcccagcagctcctccccgttccactggatggagccggactccgccttcaccaggccggagatggtccgcagggtggtggacttgcccgcgccgttggcgccgatcagggtgacgatcttgccgtccggcacctccaggtcgatgccccggagagcctggatgccgccgtaggacacccgcagctgttggattttaagcatcttccgccacccccaggtacgcgtcgatgacgcgctgattgttctggatctccgccggtgtgccgtcggcaatcagcttgccgaagtccagcacatagatccggtcggagatgtccatgaccaggtccatgtggtgctcgatcagaaacaccgtcaggccgaacttcgtgcggatctccccgatgaaggccgtcagctcgtcggtctcctgggggttcatgcccgcagccggttcgtccagcagcagcagctgcggatccgtggccagggcccgggcgatctccagccgccgctgcttgccgtagggcagggagttcgccttctccccggaaacgtcgctgaggttcacctccgccagcagctcttccacccgctggcgctgccgcgcctcctcctgccggttcagatggaaggtcgcagtgaggagattgcacgtcgcacggcagtgcatggccgtcagcacgttgtcgaacaccgtctggtccttccacagacggatattctggaaggtccgggccatgcccatccgggtaatcttgtccggggtgggggccagggcgtgggtgtactccccggcgtgctcgcccttgtagagcttgcgcatcttgccctgggggtagttttccacgatcttctcccccggtaccacaccgcgccgttggtgggctggtacacgccggtgatgacgttgaaggccgtagtcttgcccgcgccgttggggccgatcagggagacgatctccccctcgcctacctccagattcatgttgttcacggcgatgacgccgccgaactgcatggtgatattctccaaacgaaggatcttctcactcatttcgccgcctccttctttttcgattttccggagaggcgggcccgcaggctccgggccacatcagagagctcccggtcccccatgaggccgcggcggaagaacagcaccacgatcatgatgatgatggagaacaccaccatccggaagccggtccgcaggaagggcaccttgaaggcgccgatatacgtctccgtgtccaggaaccgcagccaccactcgctggccgccacgtacaggaacgaggcgatgcagctgccggagatggacccgatgccgccgatcaccacgatcagcaggatctcgtaggtcatggaggtggtgaaggtcttggcttgggcctggttggcgaacatggcgaacaggccgccgcccacgccggcgaagaaggagctgatgcagaaggccatccgcttgtgcttggccaggttgatgcccatggcctcggcggccacctcatcctcccggatggccttgaaggcccggccataggtggagttgatcaacaacaccatgatcccgatgcacactgccaccagcaggaagggcacaaaggtggaaaggcgcagcaccacctccccattggcgttctcgatgttgaagctggagaaggtgggaaagctcttcagcgcgttggcgccgttggtgacagggcccagccggtcccactggaagatggcccggatgatctccgcaaagcccagggtggcgatggccaggtagtcgctcttcagccgcagcaccggcaggccgataagccaggcgatcaccgccgccacacagcccgccaggatcagcgccgccagcacacccaggatcagacccagggcgccgccgccgaacagctccggcagggagaaattcactgccgagccgccgtagaggtagtagacgctctcccggtcggcagagggaatggtcagaatggcgtaggtgtaggcgcccagcagcatgaagcccgcctgccccagggagaacaggcccgtaaagccgttcagcaggttcagggaggccgccaccagcgcgtacacagcccccttcttcagcacggtgaacagcatactggtgggctgcatggtgttctccagcacaatcaccaggaccagcagggccgccacgcagcccagggcgatccacgcgccccgtttgctctttttttcttgcagcatcgtgacgccccctttacactttgtcggtggacttctcaccgaacaggccggtgggcttcaccaccaggatgatgatgagcagcgcgaaggtgaacgcgtcggaaaacacactccagttggagctcttgatcaccgtctcgctgagaccgatgaggaatgcccccaccacggccccgggaatggagccgatgccgccgaacactgccgccacgaaggcccgcaggcccggcagggagccggacagcggcacgatggagggatagttggtgaagtacagcgcagaccccaccgccgccaggaaggaaccgatgacaaaggtgaagctgatgatgttgttgatcttgatgcccatcagctgcgcggtctcaaaatcccgggaggcggcccgcatggccatgccgatcttggtgtggttgatgagctgggtcagcaccactaccagcgccaccaccaggaatggcgtaatcaccgtcaccattttggtggaggtgccggcaatggtgatctgactggacaggccgggcaggctggggtacatctgcggcagtccgccggtgatataggtggccaaattctgcagcagatagctgacgccgatggcggagatcatgacgctcatccggggcgcgctgcgcagcggcttgtaggctgcccgttcgatgacaaagcccagcagcaccgtcagcaggatcatcagcggcagcgccacgccgatgggcaggcttgcgctgagatagaccatgattaatcccgccgccatgaacacgtcgccgtgggcgaagttgatcaggcgcaggatgccgtaaaccatggtgtatccgatggcgatcagggcgtactgcccgcccagcgagatgccggagagcaggatggaaattccgtattgcacagggatacccccttttctttcagagttggcgagcgggaaggaccgtctccaaaaaggccgggctgcggcccctttcgaggcggtcccatctcgcgcaagaacaagccgcctggcgggggataccccgccaggctggccggatggcaggcttattccacagtctggaccgtctccagcgtccaggcgttgttggcggtgtctgcggtcttgatataggcggtgtcccggatggcgtcgccctgctcgtcaaaggcgatggagccggacacgccggtgtaggtcacgtcaggcagcgcggccttcacggcggccttgtcggtagagccggcggccttcagggcctccagcgccacatagtaggcgtcatagcccatggcagtgacagcggcgatggtatcgttgccgccgttgttggtcatggcggtggagtcctcgttcagccatgccttgatgccgtcatcgaacttgggagagccgccctcctggtagaaggtggacacgtacagctgtacgttgctgccctgcgcggcctccagcaccacgttgctgtccagtgtgtcggagcccagcagggggatatccaggcccatggaggcggccagacccacgatctgcgtggcgtaggcgatggagacggggcagaagatcacatccacatcctctgccacggccttgttcaggtaggtggtgaagtcggaggtgttggtggggaaggagtccttgatgacctcaccgtcaaagttctgctcgaagaaggcgatcaggccctggtcgtactcgttgcccaactcacccaggcagtaggccttctgtgcgctgaacttgtcttttgcgaaattcaccagcacctgggcctggaagttgtccaggaagcaaatccggaagtaatagtcgttgcctgcggtgatattggggttggtgcaggtgacgccgatggcggccaggcccgcctcgtcaaacaccggaccgccggccatagccacgctggaaccgtaggaacccagcaccaggctgacatccttgctcaccagctccgccgcggcggtgggcgccttgtcggtagtggaaccgttgtccgcgtagaccagctccacgttgtaggtggtgccaccgatgtccaccgtgggggtctccttattggcatactgcatacccagcatctcctgcttgccgccgggaccggagtcgccggtggcgggctcgaacacaccgatgcggaccacattcccccgctgctgccggagtcgccggtggatgtgtcgccgctgccgccgcaggcggccagactcagagccatgaccatagccagagccagtgcaagaactctcttcatgcttcttttcctcctatcaatggttaaggatcgctgttccctcatgtatgaaaggcattttacaggttttttccaggctttgcaagatgaataatccacagaaagttttccgctctctttcaaaaaagttcaagatttttccgcatattccggtcatttgtccctctgttgtggacgtttcaaaaaaatcgcagagaaaaatgcggtcatttgtcctcgatagagagacaggcgaattggtaattttgccaaactccagtgactgcgttgatgcattttcccgtcactccaacagttttggagggttgcggcggctttattccccgctttttgtaaaaaggccgccgtccggttctccggacggcggccttttctcagacctcttcttttttcagggacaacggctgttcgccgaacacggccagaaacgcctcccgctccatggtctcatgctccagcagataggacgccacggcctccagcttgtcgcggttgtcgttcaggatccgttcgcagcggtcataggcatccgccaccaggcgctggacctcctggtcgatctgggcggccaccgcctcggaatagctgcggccctgggtcatggtgcggccgatgaacacctcgtcgtggccggactcgaaggctacggtgccgatcttgtcgctcatgccataggtggccaccatcttccgggcgatctggctggcccgctggatgtcgttgctggcaccggtggagatgtctcccaggcacagcttctccgccacccggccgcccaagagacccacgatctgatcctccatataccgccgggagagataggaccggtcctcctccggcagggagatggtcatgccgcccgcctggccccggggcacgatggtgatctgggccaccgggtcctgatctggcagagcgtgcatcaccacagcgtggcccgcctcgtgataggcggtcagctcacgctcgtgctgggggatcacccggcttttcttctccggtccggcgatgaccttgatctccgcgtccttcagatcctgcatggtgatgaacttctgatttttccgggcggccagcagggctccctcgttgatgaggttctccaggtccgcgccggtgaaacccggagtgccccgggccagctggcccaggtccacatcctccgccaggggcttgcccttggcgtggacctccaggatctccttccggccccggatgtcgggcaggcccacgtacacctgccggtcgaaccgaccgggccgcagcaacgccgggtccagcacatccgcccggttggtggccgccaggaccaccacaccttcgttagcggtaaagccgtccatctccaccagcagctgattcagggtctgctcccgctcgtcatggccgccgcccaggcccgtgccccgctggcggcccacagcgtcgatctcgtcaataaacacgatagccggggcgttcttcttggcctgctcgaacaggtcccggacgcggctggcgcccacgcccacgtacagctccacgaaatcggagccggagatggacaggaagcccacgccggcctcccctgccacggccttggccagcagggtcttgccggtgccgggagggcccaccagcagcacgcccttgggaatccgggcccccagagacaggtacttcttggggtccttcaggaactccacgatctcccggagctcctccttctcctcatcggcgccggccacgtcgtcgaaagtgacctttttgtccttgtccgtcagcatccgggtccgggcggagccgaatttggccatcttgtccggtcccatgccacctccctggggccgaatcaccaggaagtaccacatcagccccaggatcaccgccgtcagcaggaagggcagcagctccagcagccagttggtgcgcaccggctccgggtaatcatagtgctggatgataccctccgcatactgctgttgaaccaggtcattgaagtcgtcataaaacagctggaagctgtacagctcataccgcacggtctcgctgccgttcaccggctcccgcagctccagggtcagtgtgccgccgctgtcaatggtcagccccgtcactttttcctgcaggaacagctggcggacctgggagtattccagctggtccacatggttgtcgttctgccagagccagttgacacacagcaggatcacgagggccagcagtacgaagctcagattggatagccgtctttgttttgtcacgagcagaagcctcctttcccattgcctgggacgcaatgggagactgttttcatgttacgattgggcggagtccgcccaaaacagggcgtatcgcctcactccccggagtatacctccggcttcaaaaccccgatgtacggcacgttccggtactgctggcagtagtccagcccataccccaccacaaactcgtccggcaccacgaaccccgccaggtcggcggtgatggccttagtccggcgggagggcttgtccagcagcgtcacgatggtaatggaagccgctcccttggtcatgaagtagtccttcaaaaacgccaaggtgttgccggagtccagaatgtcctccacgatgatcaggtgccgtccggtgatgtcctgctgcaggtcgtgggtgatctgcacccggccggaggacacagtggcgttctggtaggagctgacggcgatgaactccacgtcgctcttcacctggcaagcccggaccaggtccgccatgaatacgaaagaccccttcaacacgcccagaaacagcgggttcttgccatgaaactgctcatacagctccgcgcccatttcggtgatgcgggccttcagctcctcctctgtcaccaggaccttcaggatatccctttccatctcgcttttcatatcaaatctctctcctttgccgcttcggtaatctgaatgaaccggcagggctccccctccggtgctgcaaacgccatatccacgcccagccgccacaccgccgccaggcatcctcccgcgtagacggccggcagccggtcccgctccgagagggagatccggcggtccatgcacagccgtttgatgctgcggccgcccccgtgggtctccggcagaaccagacggtctcccggcgccgcagggcccaccgtcaggcccatccgctccccctgccgccagggccgaagggcaagtccctccccctcccggtgatccagcagggtgatccggtaatcgccccaggcgacggggcactcctgcaacagctggacctccgtcaaaagctggggccgggtctccaggatcagccactcccggcagtaccgggcggtgacgccctggggcaggtccacccggctctcccggccccagagggtatcccgggtcaggtgcaggatgtcctgcagatgggcggctgtgatatccctccgccccacgcccaaaaggtcgaagagccgcagcagcatccggggtcgcacggcgtccgtggcctctgccaatgcctgccgggataaggtcacccgcccctcctgcacctccacatgggcagtacggcgggcggcctcttcctccagtgattggtccgccacccgcaggcggcgtccggcgtcgttgatgtgctccacagctctggggttgatctgcctcaagcggggcatgacctccagccggaggaagtttcgggccgcggcgccggggtcggcgttggtggtgtcctccacgtgggggatgtggcgggcggcggcgtaggccgccagctcttcccttgtcacgtccagcagtggccggcaaatgccgttttgctggtaggccatgccggtaaggcccgccacgccggtgccccggatcaggttgaaaagaatggtctccgcgttgtcatcggcgtggtgggctgtgtagattttgatatgctgccccagcttctccgcctcttggcgaagaaaatcgtaccggagcttccgggccgcctcctccagggagaggccctcccgctccataaggccccggacgtccccggagctggagacgaatgcgatgtcatgggcggcacaccagtcccggacgaaggtctcatcccggtcggcttccgcgccccgcagccggtggttgaagtgggcagccactacccggccatcccgctcccgacaccaccggtccagcaggtccagcaggcacatggagtccagcccgccggacacggcacacagggccggacgcccccgaccgggcagcacccaccggggacagtgggacagcagttcctccatgtccgtacctcacctctcccaaaacagacctcagtcctcgtcgtacctcgtatccaaggtcgagaactgggtgtattccggcatccaccgcagctcctcccccggcacgtctgaacgcgccgggggaccccggcggccactgaccgggggcagacaaagtccgccccctgcaaggttttggccccgccaaaacacttgacgcacgtccgtgcggctttgcaaagcagagcacagacctcagtcctcgtcgtacctcgtatccaaggtcgagaactgggtgtattccggcatccaccgcagctctactttgccggtctcaccgtggcggtttttcgccacaatgcactcagcgatgttgtgcttctccgaatcctcattataatagtcatcccggtacaggaacagcacgatgtctgcgtcctgctcgatagcgccggactcccgcaggtccgacagcatgggccgcttgtcgtcccgcttctcactggcgcgggacagctggctcaggcagatcaccggcacgttcagctccttggccatgatcttcagcatccgggagatgtcggacaccacctgctggcggttctcccccgcgtagcccttgccgccggcagaggtcatcaattgcaggtagtcgatcaccaccaggcccagatcatccagccggcggcacttggcgttcatgtccgccaccgacagcatgggattgtcgtcgatccggatatccaccttattcaggatggtggcggccccggcgatcttctcccagtcggtctcccgcagggcgccggtcttgaggcggttgttctccaccaatgcctcggaggccagcaagcgggtggccagctgttcccggctcatctccagagagaagacggccactgtcttgtggacggccttggccacgttcagggccacgttcagcgcaaaggaggtcttgcccatgccgggccgggcggccagcaggatcaggtccgatttgttcaggcccgtgatcttctggtccaccgcggacatacccgtggagagccccggcaggtgattctcgctctcgctcatctctcccagccggtccagcacctccggcagcacctgccgcaggggcaccatgtcctgggcgctctggccccggcggacggcgtaaaccttctgctccgccgcctccagaatttcggaggcctcgcccacgccctcctgcaccatggcggtgatctcggcggcggcctgggccacgccccgcagcaacgccttgtcccggacgatggccgcgtactccatcacgttggcgctggtgggggtgatctccatcagctgggccagataggaacgggtggtgttctcgtcgtaggtgcccgccttctgcatctcctcacagacggtaatgccgtcgatgggcttggcataggtgaacatggagtagatggtctcaaaaatctcccggttctgccggaggtaaaaatctgacggccggagcttgtccatcacatccttgacgcagtccgcgtcgatgagcatggagcccaggacggcttgctccccctccagagagtggggcatctgccgcaggagaaggtcttcgtttgccatcttactgtcacctcgccgtgaataggagtccacctgtttgggttaggaaagcgcgaagggccattgtaccagagcgcgccaagcgccttttctcttccaccgggcgcggcgcactctctttttggcacagccaaaaaagagagcgggggcgcacccctgcgggcgcaggagcccccgagactgccgcaatggcggcccattcctctcccccagagcgtgcccccaaacagaggaactccctttatttttcctcaaacacggagacgtacaccgtcccgttgacctcaaaccccagcttggccttcacctgataggatccgaacgccttgatgggctcgtccagcaccagcttctgcttggggatgtcgatgccgaactgctgcctaagcccgtcggagatctccttggtggtgacggcgccgaacagccgcccgccgttgccggccttggcggtgagcttcaccatgcactccttcagcttctcggcggtggcctccgcctccgccttctgccgggcctcctcagccttgcgggccttctccttcaggttcatggtgttgatggcgtccgccgtggcggcgatggccagcttccggggcaggaggaagttccgggcatagccctcggacacctccaccatctggcccttttttccctggcccttcacatcctgctgtaaaatcactttcatgataacgtctccttttagtcgttctgtttctgaatttgttcctccagctgccgggtccgtttttccagcgcctccagccggtcattctgatgaaccagaatgcacaccagcaccgccagaaccagggcgatggacgcgcctgccaaataccagcgccggctgaaatcaaagagctggtatcctccgaaaaagatgaatgcctccaccagcgccaagcagatgccaaatgtggaaagaaatcgcttcatggccgcgctcctcctcacttttcaaaatacgcgtcgatggcctccagcagacgactcttcaccgtctccacatctgtgttctccacacggccgccggcagtggtggagttgccgccgccgcccagggcctccaggatcacctggacgttcacctctcccagagaacgggcggacatctgcacgttctccccactggggaataccacaaaggacgccttcacgcccttgaggctcagcagctcgtccgccgcctgggccgccgtcacccggtccacgccctcctggtcgatggccgccacggcgatgtcctcccggtacagctccgcccggcggatgatgtcgtagcgggacaccatctcgctcagatcgctctggaacaaccgctggacgtcggtggtgtcggcccccgcccggcggaggaaggccgccgcctcaaaagtccggccgccggtgcgcagggtgaagtgcttcgtgtccagcacgatgccggccagcagcgcctccgcctcctcccgcagcagatcggcgggctccaccagatactgcaagagttccgtcaccagctcactggcggaggaggcatagggttcgtggaagctgaaggcagcgttttcgatgtagctggccgcccggcggtggtggtcgatcaccgccacccggttgctggactccagcagctgggggctctccaccatgtcggggcggttggtgtccaccacaatgaccagagcgcccggcctcattttcaaaaatgcctccgccccggaggtgaacgcccccgcatactccggcaacgcctggagcttggccaaaaccgctccggcggcgttgtgctccagatcaatgaccatctgggcccgcttgccgtgcttgcgggcaatgcagtagagccccgcctcggcgcctacggcatccatgtccgcaaagctgtggcccatgatatagatctcggacgcgtcggccatcagctcgttcagggcgctggccatgacccgggacttcaccttggtgcgcttttccgtggacttgctgcggccgccgtagaactggaagtccacctttccccggaccaccgcctggtctccgccccggctgagggccatctccaggctgagacgggcgttgcggtacagctccgccatagcgtcggcatccttgccaatgccgatggagagggtagggcacacatcccccaccttgatctcccgaatggcatccaggatggagaacttctcctccacaaagtggtcgtagtggcattcctcaaagatgaagaggtagtggtcccgctccgtcttcagcagcaggccgtcggcgcaggcggcccagttgttcagcttctcgtcgatctgggccagcacggcgctgcgctgggtatcggcgcatgccttcatcaggtcctcgtagttgtctaccatcaaaatggccagcaccggccgggtggcggtgtaccgctcccgcaggtcgtcggcctctgtggtatccacccagtaggtagtggccaccaggttctgctcggccccccggcccttggcccgcaccaggctgccgtacacccggaaccgccggctgttcatcaccacccggtccgggcactcctgctttccctccagcatccactgaacggggaaatccggtactgcatcctccaccttcatctcgaacaggtgctcccgcacgccggccagctgcaggaagttctcattgctccagatcacctcgccggtgtccggccggaacaccatgatgggcagcggagagttgatgagggtggatttgctggcggtatccacgctgccggtaacgttatcaatgtactggaggatgttttgccgccgcttctggttacggttggtgaaataggcatacaggcccacggtgcaggcgatctccaccagtcccagaggcaggctcaccgtggcggtggccgccgcgaagacgatcatgcagaggaagtagagcttgagattgggctccagcaggcgggagagcttcttgttgttcatctcgatcaggtctccttttgaaagggacgcatacatacccatattgaagaatagtatagcagtttttcccacaagaagcaactgttaaaacaggcccgggctgatccggcccgagcctgttttgatggtcctcaggatgccgccgcggccgtccggcggccgttggcgcgcagaagcagcaggttcagccccagtgccgccagggcgaacattgccgccggcaggcccaggggcggaatccccacccctcctgcacggcgctgccgatgaaagagccgatagcaatgccgaagttgtaggataccggctgtacggaggcgcacaggctggaagcgaaagggtaatcctgctctgctagggacagcgcgtgcatctgggccggggtgttcagcaggtacatgagcagccccatggcaaagacccccgcaaggcccgcccaccggtttcccagcagcagcggcagcagggcaaacagcaccgtctgggcggcgaaggccatgggcagggtccggaggccgccccgctcccccagccggccggagaggagattgctggcggcgctgcacgctcccatcaccagcagcagcgggctcaccgcccccgctggaagccccagtgtctctgtcaggatcggcgagagataggtgtacacgatataggtggcggaggcgctgcacaggatcatccccacacacagggagcatcgggggtcccacaggatggaaaaggacttcagaagcccgctgtccgcctgtgccggcaccgcgggcagggagcgcagcagcagcggcagcagcgctgcgcccatagccaggatcacggcgaaggtccaccgccagcccaggatctggcacacggcagtgcccaggggcactcccagcaccgctgccacggaaaagccaccgtataccagcgagatggcccgggcggtctgctccggggcggcgacctccttggcatagagcatggccaccgccgtcagcgtaccggacaccagcgccgccactacccgggtggcatacagcaccgccacattaggagcggcaaagcttgccgcgctggtgaggaggaacacccccatcagcaccgccagcagcttccggcgggagattccgccggtagctgcagtgatcacaggcgtccccaccgcgtagcaggcggcgaacaccgataccagctttcccactgccgccagagaggtgttcagcccctccgcgatctccggcagaatgcccacaatcacaaattcgcaggtccccagcacaaatcccagggccgccagcagcagtaccgctccaggcagcggctttttcgtctgttccatgacacggttctccttctgtttgcgtacacagcttttcccaaaaacagcttcccccagagtcggcctccgcgggaagccggcgccggagaaagtctttcagcagttctccgccgtgaggatggggctctccggatagaaacagtcccgctccggcgtccggtgctccaccactgcgtcgaacagcagcgacagggccttgcggctctggtaggtcaggttctggtcaatgatgaagtccagcagtccctcccgcaggaaggtccgcgtctccgggctgttgtcgtgggccagaacccgcacctgccccatccggccggccccgcgcagggcttccatgcacgcaggcacggagcggttggccatgtagatatacttcaggtccggctcttccgccaaagcggcggtcaccgctgccagtgtctcatcatagttgtcgtgggtttctgccacccggcagtcctcctgccggagcccccgctccgcaagccgctccagaaagccgtctgcccggcccttgtgtccggcgtagccgtggtcggcgtacaccagcaggatccggtctccgggcctgaggaacttggcggcgatgtccccggccacccggccggcgtggtgggcgtcctcccccacgtagcacagccgccgggcgcctgcaatgtcggagttgaaggtcaccaccggcatccgccgctccgccaggagctccagcttctggcgcacctgggggcagtccgcggcgcacagggcgatcccctggacctcctccgccagcgtgtccagcaggtgcaggcagtcctccatccgcccctggcggtacgggtggatggtgacgctcacattgtagtcctgacggtcctgccggaacttcgccacgccagcggccatggcctcgcccacatagctctcccacgtgggctggatgatagcgaaatgccgggccatgccgctggtggccagggcgctggccacccggtttggctggtaatccagctcctccatcacctccagcacccgccgccggacctcctccttcacatacggccggtcgtggagcacccggtccaccgtgccgatggagacgcccgcccgttctgcgatcatcttgatcgttgcccgcatgtcccttcactccctttctccggcccttccgccggtcatcttggttttcttgaaaaaaatgtatacaaaacgcttgacctgtgctatactaggggcagaatggtgcggccttccgtgtccgccggcggcaggccgccggctgtcggagcgccgcggggcgtgcctctgcctgggccgcgccttcgtttcagtataacaaagtgcgcgtcgagaagcaactgcttttccgcccttttttacacagttccacagtatttcactggtgcggagcgccgctccgcctcagtcaaataaaaccccatacggtttcaacggaatgacgtgaccgaacccctgccggcgaaacggggccgcgcaggctacgggcgtctcttgtttgcgtgcgctcattttgcgccatttccgctgttatgggggtattttacatattttttcaaaggagtatcatcgatctatggcagaaaaattgaaaatcatccccctgggcggtctcaatgagatcggcaagaacatgaccgcctatgagtacggcggcgagatcatcgtggtggactgcggcatggccttccccggggacgacatgtacggcatcgacctcatcattcccgacgtcagctacctcatcaagaaccgggcccgcatccggggtctgttcatcacccacgggcacgaggatcacgtgggtgccattccctatgtgctcaagcagttgaacatgcccatctactgcacccggttcaccgcggggctcatcaagctgaagctggaggagcatgggctggtgaaaagcaccaagctcatcacggtggagccgggcaagagcgtccgggccggcaagttcactgtggagttcatccatgtgaaccactccatcgccgactccgtggcctttgccatccacacccacatgggcaccatcgtccacaccggcgacttcaagatcgactccacccccatcgacggggaggtcatcgaccttgcccgcttcggcgagctggggaaggagggcgtcctggcactgctggcggactccaccaatgtggagcgtccgggctttaccccctctgaaaagacggtgggcgccaccttcaagcgccagttccagggatgcgaggaccggatcatcgtcaccaccttcgcctccaacgtccaccggatccagcaggtgctggatgccgccgcggccttcggccggaaggtggccgtgacgggccggtccatggaaaatatcatgaaggtctccacagagctgggctatatgaaggtgcccaagaacaccctggtggacatcaaccggatcaagggcctgcccaagaacaagcaggtcatcgtcaccaccggttcccagggcgaggagatgagcgccttgtatcgcatggccttctctcagcacaagcaggtggagatcggcgccggggacaaggtcatcatctccgccagcgccatccccggcaacgaggtgacggtgtcccgggtcatcaacgagctgttccgcaagggcgtcaaggtggtctatgatcgggccgacatgcttcacgtgtccggccacgcctgccaggaggagctgaagatcatccacgccctgacgaagccccggttcttcatccccctccacggcgagcagcggatgctccagatccactcccagctggcccaggacatgggcatggaccgcaaccatatcgccattgccgacaatggctccgtcatcgagatcacggccaagaccattaagttgggcggcaccgttccctccggtgaggtatatgtggacggctccggcgtgggcgacgtgggcgccgtggtcatgcgggaccgcaagcgcctggcagaagacggcatggtggtggtggttctgcccatctccgcccatgacggcaacctcctcagcgagccggagatcatcacccggggcttcatctacgtgaaggagtccggggacttgatgaaggaactgcagagcgtggcccgggacgcggcggagaacgtctcccgcaagcggggccgggatgacggggaactgaagggttccgtcaagtccgccgtcagcagctacctgttcaaaaccaccaagcgcaatcccatggttatccccgtggtcaccagactgtgacataccagataacgggtgtgcagataagagagccgcagggaaagcggcatctcttatctgttcgctctgattcttgattttcagggaggtctacataacaatggcactgcaagccgcatttctctttcttatcggcgatgccgatgagaccacccgcaccgtggtatccacccctagcatccatttgaacgtggtgggctgcaagacctacgctgaggcggaggctgccgcgaaggagctggccgccgtaggcgtcaccgctatggagctgtgcgctggcttcggcaacgagggcatcgcccgcatccagcgggccgtgggtcccgacgtggccgtgggcgcggtgaagttcgacttccaccccggcctgggcttcaagagcggcgatgccctgttcggctgagacgcatgaaagcggaaggactttcgtccttccgctttttctttttcctgcacggcccgcggggaatgcagaactgcggcacgccgcgccctggcaccggcggaaccggacagtctcatccgccgcccggcgggtcccgccagctcatgccccatctgcggcgcgccggtacttctccaccatcgtcccatactccggaatctcccggaggaaggcgcagtccgggtccgcctccacctggtccagaaggggctccagcagcaccgactgggcctctccggcggcctccttggtggccagatgccggtacaggggcgaggcgctcagatcccaaggcactgtcaggctatgcagcagccggtccagcaggtccagcgccgccgggccgtcctgctccgccgccgccagctggaagggggcggacagcactgcgtaatcgctcaggtccagggcctctcccgcccgccgggcggcgtcgcaaaagccctgggcccgctgccggtctccctctgcctgggccatctcgatcagggacagcagcgtggtctggatgccgtgggcccggtcgaacagctcccgctccagcagggtccaggcctcctcggtccgcccctgcttccgccgcagggcggacagcacttcccgcttgtcccgatgggtgttggagatctggtccagcagcgcctccgcccggtccagatccccccgggcgatgcagcggctcgccacggtataggtcgcccactcccggattttggggtccgcgctctgggcggcctgctcgtacaggcccgcgacaaagtcctcccggccgggccgggctgtctcatcggtgccggggaacagggtcagaagcccctccagcagccccgcagcgctgtatgccagcgcgtcgctgttggggaactggcgcagcttctcctctgccagggaaaaggccgcgccgcacccatcggtccgggacacctcgtacagccggttcaaaaactccgcgatctccgtctccgtcaagtcctcccgaaaggacaacagtgtgttcaggtccacccgcagcgtccgggccagcaccggcagcagggtgatgtccgggtaggagtttcccctttcccatttgttcaccgccggggctgatacccccagcttccccgccagctgctcctgtgtcagccccagtgccgtccgccgggtgcggataatctcgtggatctgcatggcaaagccccctcttgtgatctgtccccagaataccatctccggcggtgcgctgcaatcgacaggtgttcaatttttctgacgatcttttaaccggcggttaatgggtaaaaatcgctgtaatcactgtgccccaaaccgggcttccggggtgcgcctctcattgggcgaacctccccgcgtagacagggcagaactccagaccgccgcgggcaattcagcgggacgcagactgcacctgaccctcccggccgcagcaggtcccgaccgaagcccttacggcgcgggtctgtatgggatcatgggaatacgctcttccggcaccggctcccatcgtcccggcaatggacatgaagggctgcgccctctgccccaatttgcaaaatacaggcgcacagcttttgctgtgcgcctgtactgcttttccctcactcccccttggggtcctctgtgtcgaacaccgtcttggcgctggcagcgagtcctgccagcccctggagctcactgggaatgatgatcttggtggccttgccgtccgccaccttctgcatggcttccagagccttcagcttcaccacctggtcattgggggcggcggcattcagcagcttcagggagtccgccagggcggtctgcacctgcatgatggcctgggcctccgcctcggcggccatgatgcgggcctccttctcgccctcggccttcaggatggcggcctgcttggcggcatccgccttgagaatcagggactgcttctcgccctccgccaccaggatctgggactgcttctgcccctccgcctggaggatggactcccggcgctcccgctccgccttcatctgcttctccatggcgttctggatctccttgggcgggataatgtttttcagctccacccggttgaccttgatgccccaggggtccgtggcctcgtccagaatggcgcgcatcttggcgttgatggtgtcccggcttgtcagggactggtccagttccatctcgccgatgatgttccgcagggtggtggcggtcaggttctcaatggcgttcatgggccgttccacgccgtaggtatacagcttcgggtccgtgatctggaagtagatcaccgtatcgatctgcatggtgacattgtccttggtgatgacgggctggggcgcgaaatccgccacctgctccttcagggacaccttcttggccacccgctccacaaagggcaccttcaggtgcagtcccacgccccacacggtccggaacgctcccagccgctccaccacataggccttggactgctggacgatgacgatgttcccgatcagcaggatcaggatcagcaccaccaggatcaacagcggaacccacttgagcacatccatcatattcacacaacctcctcttttttatcaggcgctttctgcgccgcttccacaatgagcttcacaccctccatccgccggatctccacccggctgcccgccgggagcaccgatccgtcggcgctgcgggcggtccaggtcttgccgtccacatagacggcgccggaggcgctgtcgttgtcgatggtctccgtgactctggcggtgcggcccagcacccggtccgcgttggtaggcacagcccgcccggcggagagctttttcaccaggggccgggtggccgccagggccgccgccgacaccgccaggaacagcaccagctggatcaggagccccgcccccgccatggcggcgatcagacccgccacggcgccgggcacaaaccagatggagaccagcccggcggtcaccgcctccaccacgccaaagaccacgatggccgcaatccacaatgccgtcatttcgctgtctccgcctcctttcaaatacagcatacacagggccaccagggcagtcactgccgccagccccccactccggcccatttgttggccggggacaggttgctcacaaaatctcccagcgccgttttcagtgtccgggactccatccgctccggcgccgccggcgtctcttggccgcccagggggacctcctcgcagaacaggtcattcatggtgacgccgtagcggttgcagatatagatgatcttctcaagctccgggtatccccggcaggactcccacttgctcaccgcctgccgggagaccttcagctgggccgcaaagtcctcctgggtcatgccccgggcccggcggagctcctgcaaccgctctccaaatgccatacgcctctcctctctgtctgtcattttagcagaaccgccccgccgtttccaccaactctgctttgcatccggcaaaatcccgtgcaacttcaggtttccgtccgggaagtgcggctccggcggcgtttatcgttattgtatcatgcccattttgcaaataccatttcattttggttacaaaacctcccggcccgccggcggcagttgcggcaagagccggcgggcatctcgacattttccgcagtctgcattataataggaaaaacgccccgctgaggcggaggcagcaaggaggatgttccatgcgtcagccaagaagtgcgaaggccaatccctttccatacagaggcagcctggtctgctacctgtctctggatgctgcgggcagtctcacgcaggtgggccacgatttctcctctgccgcagaggcctaccgccgggccgctgccggagagatccggctctatgccgtctggcccggggaatacagcagcgacctcttcgagattgacgatctgaatgcatttgcagacgcttttggcgtggagcggccggacccccatgtccacgatctggcgtggacgctcagcccgatggatgacggaacatcccgctatgcgaatgtgaatgttgtcttccgctgcggctgtacgctgagcaagcagaacatcaaaaagttcgccaacgacatgcgccgccagatgggttggaatgtggcgacttccacggtaccgggatgccatggcagcgccgacgggtcggaggtctacaccattcgcgtggagcgcagaacgctgggccacgccgccccctgagagcctctcttccaccggctccaatgaaaatccacgggcatctgtatgccccgccaaggaggaaccccatgaaatacaccattccctgcctcttcgggctggaggccctggtggccgacgagctgcggcggctggacctgaaaaacgtccgggccgaaaacggccgggtccactgcgacggcggcccggcggacatcccccggctgaacatcaacctgcgctgcggcgcccgggtgctggtggagctggccagcttcccggccccggatttcgaggcgctgtttcagggcgtggccgccatcccctgggaggattgcatcccccgggacggggagttcccggtgaagggctactccatctcctcccagctccactccgtccccgcctgccaggccattgtgaaaaaggccgctgccaagcggcttggccaggcctacggctgcgagaccctgccggagaccggggaccgctatcagatccagttcgccctcatcaaggacaccgcagccgtgtacctggacacctccggcgacggactctacaagcggggctaccgggcccacaacaacggcgcccccctgcgggagacgctggccgccgccctggtgctgctctcccgctaccgggggagggatccgttctgcgaccccttctgcggcagcggcaccattcccatcgaggcggcgctgatcgccaaaaaccgggccccaggcctggaccggcgctttgccgcccaaaagtggcagagcctccccgccaagctgtggctggacgcggccgaagaggccatggatcaagaattccacggccagtacgacatctggggcggggacatcgaccccagtgcggtggagttgagccgccacaacgcggagctggcgggggtggacgactgcgtgcgcttcgaggtggcggatgccggaaagttccaccgggacagcgactacggccagctggtgaccaatccgccctacggtgagcggctgctggaaaagagagaggcggaggccctgtaccgctccttcggcaaagctgcccggacattgccggcgggctggcgcgtgctggtgctctcctcccacacagagtttgagcgcgccttcggccgcagcgcggagaagaaacgcaagctctacaacggcatgctcaaatgcgacgccttcttctaccacggaggcgcaaagacagagccagacaaaggttaaaagacaggagagatcgccgctgacagtcctcatctttcatctcttcactcttatctcatatttcgccaagggggcctgtcatgcgccatgtctttttgatcaacccccatgccgggaagcaggaccagactgcccgcatccgcgccctggcggaccgtctggccgcggcccacaatctggactgccggtgcctgctgacggaccgccccggcggagcggaggtcctctcccgcgccttggcagagaccggggagccggtgcgcatctacgcctgcggcggggacggcaccgtccacgaggcggccaacggcatcgccgggtttcccaacgccgccatgacggtaatccccgccggcacaggcaacgactttctgaagaacttcggcccggacgctgcaaaattctccgacccggaacatctgtgggacgggccggaattccccctggatctcatcgactgcaacggccgcctgtgcctcaccatcgcctgcagcggcattgacgcccgcattgctgacaccgtccaccggtacggaaatgtgccgggcctctccggccgggggagttacctgctgtccgtggcggtgaattttctcttcaagcccatcggccgccggtggcgggtggagctggacggggaggtcctggaggatgacttcgctctggtgtccatgtgcaacggccggtactacggcggcggctccatgccggtgccggaggcccggatggacgacggagtgctggagaccatcctggtgaaaaacgtgccgaagcgcaccttcgcccggttgttcccggcctactccgccggggagtattggaaatttccccacatcgcccgaatggtgacgtcccggcaggtggtgatcaccgccagccccggggaggcggacatcgtcacctgtctggacggggagagcctccggagccgggaggtgcggctggtactcgcggagaagcgggtgaacttcttcgggccgaaggggtgcagtcccaatgccacggcaggatttgaccgaaagccaaggaagcgtcgatattccacagcttttctgctattataggcatcctacgatcattcaaccgctgcgcctcggcacggtataatagtcaactagaataattgataaatagaggccaggacacacccgaaggaggtgtcctggcctcttaatttttcattcagtgctttcctgcttccatttatggcttgtcgtatcggaatgcagaaacgatataggcaattcttgatgttccgtaaggcacaatccccccataaccaaccagataaaggcatattcccttgtcaggccaaaggcaatcatgccggctataatggtcataaatgaagcgtacagtgcgacccgaaatgctttttcagcgcatttcaattcgatatactgatttctctcatcctgttccgcaatcatatcctcttccgtttttttaggtttcagaagggaaatgccggccagcagaacaataataaagagagcaacccctgcgatagctttttgcgaggttgtgaacgcggtaatatcacccagataaaagctgccgaaggcagccaataccaagagcaggcccagcatcttaccctttccgccaaataattgcatagttatttttcctccgctccctcgtcctcgccgtcaatatgcagggccattaccatgtgataaagagctgcaagtaagcagatacctatgccgataaccgcctttggaataccatgcgtagcctcggtaaatatacaaaatcttgatattccaataccaacggcaagcagtaataataaaatcccccggataaacattttcttatttgtgatcttcatcctgattttcctcacattctacattttctttcaagcagcacaactcttcaacggtcgtatgaaatacctgtgcgatcttgtaggccagaacaagcgatggattgtattcgcctctttctatggaattgatcgttcttactgtcacacgaacccggttcgcaagctgctgctgcgtcaatcctgcggcagttcgcaaatccttgataatcgttttcacgctcctcactcctcaaataggaagttaacttcttaggaagctgacttcatattaaattagggcagcgaaaatgtcaagagaaattttaagaagcttacttcctattgaacagtgaaaaagccataaaaatattgcattaaaggcgcgtcagcctccgctcctgtccatggcggcttgccgttcatctcgaccattgaccgaggccggatgctgtgttgaaaaatttttcagggaggtatgggataacccgcaacaacagcatataaagaaacctcgtattatacggaacacttgataaaaatcaaaaatttctttatatttggaaactttttcccgtgaattgtacagtatttgcgccggtgaaaatcgtatccgtgaagaatgcgtaaccccaagcagagctgtttcatgcggcacagtgagatgtgaagccgtcagtccgcctgaggcagccgtttgggcagaaagctggtcatgacagttgaattctcctgtccagcaggacggctcccatgcgctccccttctgagagggagattttttcggaattcacaaattcttcatagataccccctttacaaatggaaaacattgcgctatgatagcagcgttagcactcgaatgatatgagtgctaacgctgaacttgtttttcaaatttttatttctataaggaggaaccccattatgaaactcactccgctcgcagaccgtgtcattctgaagatggtggagaccgaggagaccaccaagggcggcattatcctcaccggcagcgccaaggagaagccctccgtggcggaagtcatctccgtgggtcccggcggcaacgtggacggcaaggacgttgtcatgaccgtgaagcccggcgacaaggtcatcaccagccagtacgccggcaccaaggtcaccctggaggacgtggagtacgtggttgtccgtcagaacgacattctggcgatcgtggaataaatctcccgctcccgcttgcaatcaggaatcggaaattgtggagccgcctgcaacggccaatttcaaatcgtttggctctgccggacgccaaaattcccaattcctaactccccatccctaatttatgaaacatgaagctctattacaggaggtttgattactatgtctaagctcatcaagcgcggcgacgaggcccggaaggccctggaagccggcgtcaactctctggccgatactgtcaagatcaccctgggtcccaagggccggaacgtggttctggacaagaagtacggcgctcccctcatcaccaatgacggcgtgaccatcgccaaggagatcgaactggacgatccctttgagaacatgggcgcccagctggtgaaggaggtctccaccaagaccaacgacgtggccggcgacggtaccaccaccgccaccctgctggcccaggccatgatccatgagggtctgaagaatctggccgccggcgccaatcccatcgtggtgaagaagggcatggccaaggccgtggaagccgcggtggccgaggtcaagaagcaggccaagaccgtggacggctccaaggacatcgcccgtgtcggtgctgtgtcctccggcgacgaggagatcggcaagctgatcgccgacgccatggagaaggtctctgccgacggcgtcatcaccattgaggagtccaagaccgccgacacctattccgaggtcgtggagggcatgcagtttgaccggggctatatcaccccctacatggccaccgacatggagaagatggaggccaacctggacgatccctatatcctgattaccgacaagaagatctccgtcatcgctgacatcctgcccatcctggagcagatcgtccagtccggcaagaagctgctgatcatcgcggaggacgtggagggcgaggctctgtccaccctgatcgtgaaccgtctgcgcggcaccctgaacgtggtgtgtgtcaaggctcccggctttggcgaccgccgcaaggagatgctgcaggatatcgccattctgaccggcggcaccgtgatttccgaggaggtcggtctggagctgaagagcgccaccatggatatgctgggccgcgcccgccaggtgaaggtcaccaaggagaacaccaccatcgtggacggtgccggcgacagccaggccatcaaggatcgcgtgggccagatccgcacgcagatctccaccaccaccagcgactatgacaaggagaagctgcaggagcggctggctaagctggctggcggcgtggccgtcatcaaggtcggcgctgccaccgagaccgagatgaaggagaagaagctccgcatcgaggacgccctgaacgccacccgcgccgctgttgaggaaggcgttgtggccggcggcggcaccatcttcgtgaacgtgatccccgccgtggaggctctgctttccagcgtggagggcgacgaaaagaccggtgtccgcatcgtggccaaggccctggaggctcccatccgtcagatcgctgccaacgccggtctggatggctccgtgatcctggagaaggtccgcacctccggcaagaccggctacggctttgatgcctacaaggaggagtactgcgacatggtctccgccggcatcatcgatcccgccaaggtgacccgcagcgccctggagaacgccgccagcgtctccgccatggtgctgaccaccgagtctctggtggccgataagcccgagcccccgctcccgctgcccccgccggcggcgagatgggcggcatgtactaagtgcaaaaaacatcaagccccctggctttcgccagggggcttttctcgtggagactcggcttgtcggcggagcacaagcatcaagcattgagtcctccactgcgccttcgagcggggtgagccggagtcgggaatcgcttgcgttccggctataacgccggaatacaggatacgaagcttgtgatggcaggaaagtgggggtgacaggctttgcagcggcgccccgcttccaccagcggcacagatgctgcacatactgagtaccagcaaccattaagccctttggctttacagccacagggctttttctcgtacgctggggttccatcagcgttgccctcccctgcccatactctggaaaccgcagtcggcatgcgtcatgggctatgcctctgctcatgtctgtccgacctgatacttcttcagcagccgccacagtgtcccccggctgatccccagttttgccgccgtctgcgtccggttcccgccgcattcctgaagaacggccagcaactcctcataggacaggtcgatcctggtatgggcggccttcggcatcggcggcgggcacgggggcggcgtctcgggagaggcggcactctccagcagatgggcgatcaggccagatacagagacgccaggccggtaaagcaccgccagccgctcacagaaattctgcagctcccggatgtttccccgccaggggcagctctgcagcagacggcagtcgccatcgctcagttccagcggacagccgtcgccctcccgagcctggaagttccgaaggaagctctgcgtcagcagcgggatgtcctcctgccgctcccgcagcgggggcagattcagctacaggacatacaggcggtaatagagatcgctgcggaatttacctgcccggaccagcgactccaggttcttgttggtggccgcgatcacccggatattgatgggagtcacctgactgtcccccagccgcatgatctcccgctcctgcaggacccgcagcagccgcccctgaagtcccagggggatctccgagatctcgtccaaaaagatggtgccgttgtgggcgatctcaaacaggcccggcttaccgcccctggtggcgccggtgaaggcgccctccacatagccgaacagctcgctctccagcaggttctccggcagggcggcgcagttgatggctacgaagttgttctgtgaccgacggctccaggcgtggatgctctggctcaacagctcctttccggtaccggtctcccccaccaccacgatattggagtccgtctgggcaaaggccttggcctcctggatacaggctatcatccgcgggctgcgggtgatgatatccccgaaggtgtacttggccttgtgtcccttgtagtggagctttttgcgcagctggtcctccgtggtctggatctgcgcggcgttcagcagggaaaccacagttccagcccggaggccgtgcatcatcatgtttttcgttttgacggacaggtgggtgtttttgtaagcgataatctcgtccgtgttctccgtcgcggacacgatgcggctcaacgccggggtggagaacacggaggatgccggctttcccagatactgttcccggcgggagagctgcaaaacctggatggcagctggaaccgggccgtatttctgccgcagctacagcaggatattgacaatgtccgttccgttgataatcagttcgatcacccggatagagagggagcggcagcacaggtccagatagatggcaccccgagcgatcatggcgtcgcagtccggccactgcggcaacagcccggataccccggccgatgacgcctcttcggaggatggcggcactgactggcccaccaaatccatcaacatgatcgttcccatgggcgccgggggcgacactgactttaatgcccgcacatatgcaaaatatctggaggatgtgttgggtgagaccgtagtcgtcaccaatatcaccggcaatggcggagcgctgggttccgaggaagtcaagaacgcctctcccgacggttatacctgcctgttttatcacacctgcctgaatatcaaccaggccaccggcattgccgactacggttccgaggcatttgagaccgtggctgtggtgggaaagagttccggcgaggccgtggtcgtgcggaccgacgccatgtatgatgagttgaaggccgcccccacggcaccgggcttccgggagatcatgatccccggggagatcgagttccatctgacccggcaggcggagcgggagggtatcgacatcagccccgccattgagcaggacttcgcggatctggccgtcaggtacggcgtcccgctggaactgctgcaatcctgctgactttccagtggaatcggctgtcccccggcccctgcgggccgggggacacacagacaggaggaatgaaatgcacatcgtcattttggacggatacacggaaaaccccggcgatctcagctggggagaattggagaagctgggagacctgacggtttacgaccgcaccagcctcaccgatgaggacgagatcatctcccggatcggcggtgcggaggtggtcctcaccaacaagacccccatctcccgccgagtgatggacgcctgtccctccatgcgcttcatcgccatgctggccaccggctataacgtggtcgacatagcctgcgcaaaagagaagggcatccctgtctccaacgtgccggtctacggcacccattccgtcagccagtttgccatcgccctgctgcttgaaatctgccatcacatcggttatcataatgatacggtaaagagcgggaaatgggaacagtgcccggactggtgctactgggactaccccctgatcgagctggcgggaaagacatacggcctgcttggctgcgggaacatcggcatccacactgccgccatcgcatcggccctggggatgcatgtcatcgcctacgacatgcgccagcgggacgaagctctgcagctgggggtggagtacgtctccctggacgaactgttcgcccggtccgacgttctgggcctccaaatgcccctgttccccttcaacaccggcatcatcaaccgggagaacatcgccaagatgaaggacggggtcatcattatcaataacagccggggccagatggtggtggagcaggacctggcggacgccctgaactccggcaaggtggcggccgccgggctggatgtggtgtccacagagcccatccggggcgacaaccccctgctgaccgccaagaactgcatcctcaccccccatatctcctgggcccccagggagagccgccagcgcatcatggactgcaccgtggacaacgtgcgggcctaccttcagggcgcccccatcaacgtggtcaacccgtgaccggaccggggcgggccttccgcccgccccgcgcatccagagaggaggaaactcatgtcaaagtggattctcatgccggactccttcaaggggaccatgtcctccctggagatctgccagctgatgcgggaggcccttctgcgccacgtgccggatgcagaggtggtctccattcccgtggcggatggcggcgaggggagcgtggaggcgtttctggccgccatgggcggccaccgggtagaggtgccctgcaccggtccggattttcgtaagatctctggtttttacggtctgctggccgatggctacaccgccgtgatcgagatggccgccgccgcaggcctgcccctgatggaaggccgtctctgtgctgagggagccaccacctacggcgtgggagagctgattctggcggcgatccgggacggcgccaggcgcatcattctgggcctgggcggcagtgccaccaacgacggcggctgcggctgtgccgccgctctgggcgtccgctttctggacggcaccggggcggagtacgtccctgtaggcggcacgctggaccggttgtgccggatcgacatgtcccatcgcttccccctgctgaacggtgtggagatcgtgaccatgtgcgatgtggacaaccccctctgcggtcccaatggcgccagcgccgtcttcggcccccagaagggggccgaccctgatatggtgacccgtctggaccggaatctgcgccacctgtcggaggtgatccgccaggacctgggccgggagatcgcagaccttcccggtgctggcgccgccggcggcatgggagccggtgtgatggctttcctgggcagtcgcctgcagatggggatcgagacagtcctggacaccgtgggcttcgatgccctgctgcctggtgccaccgcggtcctgaccggcgagggccgtatcgactgtcagagccttcggggcaaggtggtcatcggcatcgcccaccgggcccggcagacacggatcccggtggtggccgtagtgggcgacgtggcccccggcgcggaggacgcctatcaagagggcgtcaccgctatcgtgtccaccaaccgtcgcgccgtgccctgggaggtagcccgccagtccgcccgggcagatctgtgcgccgccctggaggatctcttccggctctacaatgcgttccggtccgcccgatgacatgagtggatttttgaaaagacggtgccgggcggtaggagccgcccggcctcattcccaccgtatccgggctgccggcctcggggcaccctgccagcggcagcgagtctctcctctgcttccggttttttgaaatttttcatttttttcgaagaaacacttgacaaacgccgccgccttctggtatagtaattgatgcccgttcgggttagacatttggcggcatagctcagttggctagagcatgcggttcatacccgcagtgtccccggttcaaatccaggtgccgctaccagatccatgaagcgccccggcgcttcatggacttccaaatggcccgttggtcaagtggttaagacacggccctttcacggctgtaacatgggttcgaatcccgtacgggtcaccatcccataggacgccgttgtgcacggcgtcttatgggcagaaaaaaattacatatccgtatggaggcttagctcagctggttagagcgcctgcttcacacgcaggaggtcactggttcgagtccagtagtctccaccaaagaaaaccctagagccgcaaaggttctagggtttctctttattcaaaagattttatgtttgttagtaacgtgtaagtaacattacaatcctctaatcttccgcattaccccgttatacacacgggggttagcaacttgtagcgtgtccatcaagtcatccataatgccccatacctgctcctcgtttctcccttcaacctcgcggagaaattcgctgtctccgtatctcccgacctctacaggtatttcagccggagccgcagaataggcttgctcataggtgcgattttgcatttccggttcttgcttctgcatctggttcttgatggtgtacaaggttgccaatttagcgtatgcgggatagctgctttctccatattcgagacgtgcaatctcaatgtcgatctctttggggtctagcatagggggcaccccctatcaatcccgacccagttcggacataaagcggcgaatggcgtcgcgctccctctcagtagtagcgttatccatcatctcctgagcctgctccatcatagcctctttggagtcgtggcggctgtatccgccgcgcccgtcacgggagtagccgccgtcccggctgtagtggccccggacatagtgcttgccacggttggcatagctggagcctctggcatagctggaaggagagtccatgtcggctgcctgactgtaaccgccctcctctagcatcatgatcttgtccacgttcttgatggtatccgtcagcttgtggaccatctccaggtccccggcgttcatgttgcttttctgggcatattcctccagctccttgcagagcttttctttcaggtcatacagatattccatatcggttctcctttcacgcgatgcgctcaacaataaaattactgttggcaacgaggatgggctgtgtgctggtgttctttgcggcgacagtgacgcagcagccgcgagggacatctaccacagcggaaacataaatattgaagaaatcctctgcggcagccggggtgatggtagcggtggaagcgttcagcgcctcaccattgatggagatcgctgccgtgatggcctccacggtcccaccagtagggatagcaatattcgctccaaaggagactttgaatttcgcgcggcactggttcgtaagcccgcgaagagtcaccagcccagcgccttcccgatgcacaatgcagggcttgcccgtgttggcctcctcagtaaaaggcacgttctgaccagcggcaacggttacgattgcgctgttgctgtattcagccataaacttcattcctttcaaaaagatagcggcgaggctgttgccccgccgcatggttcaaaatcggcacggggccgaacatgtaagcctttcttacaagttgatgtattgggttttagcagccgcagccacagggattgcagccgcatccggcataaggattgggcacctgataggccgggacaggcatgggattgatgcggcggatcagctcggcagtctgcgcttcctggttagcggtaataaaagcattctgcgccgcctgagaagcctggaacttcaggctctggttttcagccgtcagagtagcgatcttgtcctgggtcaggaagtccaggatcgcgcggctgttggcattggcgttgtcgatgatgtcgcgggtgctggactggatggtgttgcgggtatcgcaagcctgggtagccatgtcatagcggacaccgtcaatgctccgctgagtatcgcagcagcactgcgccagctgggcgccgagggcgttaaagcccgcctgcgtctgatagcccaggttgcacacagcggtatccacgccatggaagccgttgctcacggcatcccggatggaggtctggccgttctggagaccgttcagggcgaagccctcgttgatgtcggagcgtgtagcgtaaccctggaatccaggcccgtttgctccgccaaaacctccgccgaagccattaccccagccgcctccaaaggccccccaaatgagaaacaaaataatccaggcagaccagtctccaccccacatggaaccattgccgccatagccaccagcggaatacgcaggagctaccggcatagtcagagttgcgtcattactaagagacatataactttctcctttgtaaaaatatttataaatgcggccgcatctatatactttttgatgtttttgtgctataattgttatgcgtggatagggtcgctcccgacaagccgttaccctgacggtttccacgcaatctgacaatcagggcgcatgaaagggtaaatgcgatggaacaaaaaagaatctataaaccatatttcgatgtgaacgagtacatcggaaaacggagcaattacttgactgtaattggactggctgaaagaaagccagacgataccagttggaggttgcgatgccgatgtgattgcggtgggacaattgatgtattgccttatcaattcaaaaacggagccgtaaaaagttgcggttgtctcagaaataccatctacaccaaacaagacggccgcagtaagcatcccttgtatggaatctggcgacagatgatgcaacggtgttacaatgagaagtcaaaaatctatcgccgttatggtggccgtgggatttatgtttgcgaagaatggcatgatttttcaagtttgttgagtggtctgattctattggcggtaggccggagggttatacgctggacagaagggataatgacggcccctattgtcctgagaactgccgctgggcaacgatgaaaacgcagaatataaacaagtccgataacattgtgattgagtacaatggacggactcaaacgcttgtggaatgggcaaaagaattaggaattaactgggtcacatttcacaaccgatatgtgcgtggctggagcattgagagaatgatgacagagccagtccacacaaaacctgaccgaacggcgggggcttaatgcccctgctgtttatttcccaaacataccccgcatcccctcaaacatgccctgcatctgctgggcctgcttttggacttggttgagctgatcttgggaaatgcgtccagaggataccatctcttgtatcatggcgttggggtctttgccccgcatctgctgcatgaaggattgaaactgctgcatcatgttgggctgtctgttgccgcccatagcctgataaaacgggttcattctgcatcctccttatcttttgccgccagcgcatccaggcgggcctccaacgcttccaagcgggacaggggcgcatactctaccgttggagcctgcggggcctgtacgggcctctgattgcgctctacaaggtcatatatcttcatgctgggcttgccgcttgcgtccgcctgtttgagatagaccactggggcgttactgtcccacaaggtaacggcagagttaggcgccaccagataatttgccgcctccatctcgctctgcacccacacaatagacggagatgccggggcttgctgcggctgctgcatgggttgataggactgccgcagctgcgtcagctggtccgccataggcggctgatacggttggtacggctgatagtaatagggatagttcggcatctcacgtcatcctttctgccagtagtacagcacagtttcgtgttcactgtgccatgtatcgtagatcacaccatcctgcaggcataccacatggccggacagggccagaatgtaagtcccgtttggatgccccatcgcaaactccgccacggtcatatcctcgggcgccatgtcccgccggaagccatgccgccggaggtaagcgccccatgtggcgttggcgcttggcatatcacccctcacagcgccctcaatgcagaggccaagatatgtcctgtaccagtcctgctccagcgccttcgagatggcccggacggtgcaatcccccacatttttctcgtaggggttcggattgtaaaattcaaacatattgctttcggtcgtcatacaaaagctcattctgccggataaaccgttccaatccggagaaatctccctccgccgcatacttctcgcaggtgtctcttgctgtggactccgtgaagccacaggccaccaaccgggccaccagttctgaaccattcagaatcaacttaaaacacgtccttatcattgaaatcaggaggccgcaaggagggcggcgacgtgtaccagcccttgttccttacgtcctcctgatgatattttcgcaaaaaaagcccccgcctgggtggttcccaagcggggtttaggtgaaattatgtgaaatgtagtttttgagctgtgctttcaactttgcggagaatccgtttgagtcgataagagatggttgaccgctcccagccgaactccgctgcaatgtcgatctgcgggacttggtcgatcaggtagcgccgggcaatgtccgtatcgtcgttcccaagattagcttcccggatggccgtctccatctcggagcgcataaggccatccaggctatccggtaatctgacacgggcagttgccacagtttcacgtcctttcgatcagctcccaaagccgatgcaacatcgtgcacatctgctgccgggtaacgggctgggagagcatcaggtctccctcgctgttgcccgtcaggatgccgttctttacggcccattccacgccctccttgtgggcgccgctgggtgtattgtccatgatcttgacctccagtctcttcttgaactctgcccacttctgggcgttcaccaagtacgacgggcagtgcttcccagtcacgtcaaagtgacggtacacgttctcaatggggatgtgatacttctccatcagctcccggcccagagcggcagcgttggcaagggttgcctcgctggcctgatagacaccgttccggatggtgtcacacatctcaatgctgatagagttggtattggtgatgacgccgtacatggtgccgccgccagtcttgtcggcgttggcgtacttgctgccgccgacggaccacgcaatcttcagatcggggacggacagatatacggtggtatcgtccacaaagtaatgggcactggccttgacgatgttccgctggaagtacgcggcgttgtttgccgccttgtccccgtcattcccggtgtagtggtacaccagataccggatttggctggcattccgggaaccgccatagttcccggagttcgccagctgctcctttatcgtgtagctcatttactgtcacttcccagctgcttgattacctggttggctccggtagcagccagaccgctcacaatgcccacagccgccgcagtgatgtagtccgtggccgggaagtccggcataaggaacatacctaccacacccagcacagcaccgcagacaccgcaaatgatagggatgaacttgctgtccagagaggacgctttcacgccctgcccaatcagcaggcagatgacggtgatagccgccactccggtgatgccaagagaggaaatgtccatatcagacctcccgattacactcggatggccttgacggcataaccgtctgcatcataggtcacatcaaactttccgcgcttggtattctggcgaaccacttgtccggcaagcgcctgatttcggcccatgtctaccttgtccggaagaggctccttttcctcgccgggaaggaatccctccgccatctctgcctcggtccatccgccatcggggttcttttcggggttcagggagaatccggcgccagcctcaaccagcagcttgttggcatcctccacagtaatcttgccgctcttgaagtcatcgatgatgttattgatggtcttgttcatgattggtagctcctttcaaatttccggcttgaccgccggttgatgatgatgtaagatgcaggtgtgcccccctccttattgatgtggttttacttttttccatatcggggcactcgcggcgctccttcgggggcgtcgcttttttacagcccaatgcgggccaaaacaaacgcaattaccgccgccagcaccgcccacacggacttgtccacgatggcctcccaccgctttttcggcttggcctgctcggcctcctgccatgagatcagccggtccagcttctccatgatattgtcgtactgctcattccgggcggcctccgccttttccagttcccgcatccggttaaagagttctttgtgggtgttgcgggacgcctcccgccattccgacatctgcttttccagcatgttggctttctggaggcccaggcaatccctttgcgggtccaggatgcacttctcgtccattttactctgccgcctccgcagtcagcatcttactgagggcgctgtattcctccggggtcagcctgtcggcggcgagatacacgtccatcttctcctgaaggccgtcagtgcggccccggtcaatcagcagcttgcaaagattgtatacagttgtcatggtcctgctcctttcctgtcatacagtggttgtggtgagttccaacatacacaggcgttcctcatggtctgccagcatatcaagagtaatgtcctcggctcccggttccggctccggctgtccatcgtcctccacggtaatctgcccttggtatgcctccgcctgggcgatggcgtaagcctcctctgtataggacacaacaacagcagttaacaccgtctcgatgtccggttcctcaggggtgccgtggttgatctctgttgccaactgatatttgatgatcttcatggtgccctccttaatccgtggttttggtgtacttgataatcgcaacagtatttaatttagatgatgttgctgcactactaaaacttccatttgtatcaatcccgacacgagaagttgttgcatatattgaatcaacaccaccgctcccgacaagatttataggtccactaaatccgctgcattcaacgcatgactcaaaatcagatataccatgctccacacttttagaagtattattttctagcagcccgagactcaccgccttgatgtgtatcggcttgccgttgtaccgctccacggtgcggtactcgacgcccaactgcatggggggatgctcccactcaaacggctgccaagcagacgggtctgacgatgatttttttaattttatcatccgccatccgcacagcgccgtgtctgcactgccgatattggatagcactgcatagttggcgtcacccttatataagagcgatatcgtagtacccgctttgccgtacaccgcaggcggataggccagcaccagttttgcggtcttgtcaggcatcccgtccagtacggcgtctaccttggcgcagtatgtctcataggattctcctgcgctggtggtttcaatgctctgcaccgcatccccaaagccaaaccccgcgggtgccttattggacaaagccgccagtacacctccagactggacaggttttgtactgtcttctgttggtacagcatccgtcgggactgataatgtagttgtggagccactttgagacaactcgatattgtctcctgcttcaatggttaatgcattgacaccattaatagtagctgctggtccagcaggcccttggataccctgtgcgccctgcggtccaggttccccttgtgctccctgtgggcctacaacctggcccaaatcaatctgcggcatgatacagccctcctttaagcaatatttaggtagagatgcccgtcctctccaatctcaaagtcgggcgcggaatctccggtatagtacaagatcaaatgcccattttcgtctatgttgaaagcatattgcccttcagccgcaacagctacgccgctggggccttgagggccgggcggaccctgaattccctgctggccttgtggtccaggctccccctgtttgcctcgcggaatcccgaaagcaatgtggaaagattctgcaaccgctgttttggtggctgtggcgttgctttcaggcggtagagtttctgccgatacggtcatattctcaatggcgtttttggcggtctcagcggcatctttcgcgttttccgcgcctgtccttgcttcctctgccgcttctttggctacgtcagctccctgttttgcaagctgcgcttcttctgccgctttttgagccgccgaaactgactctgcagccgcagcttgcgcaaactttttgattagctctcccttgatactacgcgcctgtgattgttgctctacaactagcaggctatcattatcaagttgggaagctacgggaagagaacctatcgttttgtcagccatgcttcttctccgtttcctccggagcggatagttccaccacgcggcgcagtttagctctaatagctgcaatggcatccacggcgtctccgctaacagtcagtgaggacaagattgcataggcactggatgcctcttcatggattttagtcaaatcggccattcaattttccctccaaatctttaatctttttttcgagctgctgaattttggcaatcgccataatctggatttctccatatcgcagggtgtacaggccgtccggatgctcctcgctgggtagttccgtgcagagcgccgcgaagtcgctctccgggataccttcgtccgccagggcctcctgcacttcctgggcgatcaggccaaagtggcggcgtttgtgcccatcatagacaaaggtgcagggcttcagccggtcaaatacacccaggtatttctccacgtcatattgcttttctgttttcagccgcgcgtcggaggttgtggccggctccccattgatgaataccgtgtccccggtgatggagacctgcgtactggtgcacaccaccgtggaaacgccgtcgtatcccatccgggcgccgttggtggtgcagatcaccactgccgcctcgttgctgctggcaatggcgattcccgccgttgagctgccggatgctgtcatgccagacatatatccaatatatccgccaaatgaacttccactggctgtccggtacacgtccatttttccgcccaaatggatatagttggcactaatttcaccagttcgaatacaacccccagaaattagggttgtcccatctgaaagatcggattcaaacactacatctcctgtgaacctgatagtctgagacgcgactgtgattccattgatttctaaccggatttgagacgatgcggttccgtttgtgacgtcaagcgtaatagagttgactgtctgctgaatctgagatacctgatttccaagtccctgtacagtgctggtaatactgtcaagctggacactgatagatgcagacaacccgtcgatctcatttgcgacttccaggcggatttcttcggcggttttggtgattagggagtgggtttgggcgagctgtcggtttgtttcacggcgttctttggattcataagggtattcatcgtcaatttcgtccgattcaggggcggaaatggttggagcgcaggctcggtcaaataagttgttgatagaggcgattaccgaataatatccgcctaccgtcaccgcgtccccgatttctgctgcagggtccaaaagtgcatccgtcgctgtataaggctgatatgttttcccgctgatagcggccaggatactgttcgccatctcctgcgtgccccatgggcaggttacttcgatagcccggccggtatcgtctccagcggtatagtaatggtcgctgtctacggacaagttgactctgctgatgttggcgggtatgtctcctgtctctagctccccgacgtggggccccaaaaaaaatttgtcagacaaggattctgtcacccccaaacgtgattgcaaagccgttttcctcaaccagataatacgtttctggaggaatgtcgccatacttcactagcagcaatttcccttcatcggtgataatccaattcccggcgttggatacggcgatatagcccagtacctcccgcatggtcaagtcaccgttttcgtccacgggataatccacagggaatgatgttgtcagaaccgttctagggtctacctctacccccatccggtaggcaatatcttctgccgcttcctgctgtgacatgggccagttttcagtatcataatcggagttgagccataccgactctgctttcaacatagcgtcatatccagtaatagtcaggcttcccgttcgcttgtctttcgtcctggtggagataaaaaatacgcctttttccaaccattcggaccgctgttcccccaaggccaaccgaacaaaaacttttatttgagcctgtctcgggatagctccggtcggtagtatttcaaggtcaatctgccgggcggcgcaatttccgattcctggggtggtaaaaagtccgcctgacgtccgaacagagacaatgctttcctgcccatattccacaccagcaacgtccagctttgtttccttgtggtggttcgggttagatagtatttctttatagagatcacttgtaagctgcatcagtttgccctcatctgcaactcgccgcctttgtaataccgctttccgttgacagattttaacccaaaggatgcctctaaattgctagtcaggcgcatggttcgcaccagatcagaagcggtgtatggatcagtaaatatcactgtctgcgtttgttccgccagcgcatcgtaaacagacgaggccaagtcatcgtcaaggggcaaaagagagaaatccacaatcgctcttttgggtgcagaaaacggatgctccacattgtcgagggttgtaatgatcttctgataggaaacttcccacattaccttgtatgtggacagcttcgatgccaaatccagcgtcccgatcttgaatgttacatccatatcatcacctacgttccgtaagcccgctgtttattgcggctatactgataagcagtttcgccgataactttaccgtcaaggaccgactgcaccgtgattgtaaagttctggcccattgtggccgctatgttattaaatgcattggataagccagactgcgaccggcccaacatggaagaggagtagtcaacattagcggttccgaaattcaagccattctcaatgtcgcgccgaatatgactatactcattgtcccagccatcccctagtccaagggccatgtttttgcccatgtctgcaaagaccgtggacggggagtggatgccaagcaatccctttactccatcgacaatcccggagaaaaatcctgttactttgtttttaatccaggttgccatgttctggatgccttcccaaattccctgcacaatgttttcaccgatatctacaatacttcccattagatttccaataccgttcacaatggcagagataatctgtggcaatacagcaaccaactgtgggatagcagatacaatgccggatgcaaggtttacaagcacgctaattccggcgttcacaatggctgggagattatctgctataaacccagtaatggcggagataacctgcggcagagacgaaacaagagacgaaatggagtttataattccatcttgcagagaagtcaaaatctgaacgcccatgtccaagatagatgggagattttctgcaatgaaattcaggattccttctatgatctgcggcaatctggaaattaaatccggaattccggtttcgattccacttgtgaacatagagagcagctgtgtgcctgctgttgccaactgcggcccagcggaaacaatgcttgtgtatagggcagaaacaatttccggaacagacgccgccagttggggaagagcgctgataatgcccgccaccagacccacaagaagctgcgccccggcgctgataagcgatggtaaaactgtggaaatcatttcaggaagcgtctgagcaattattgtgcccatatctgcaataacttgcccaattccgcccaaaattatttttactcttggaagaatattacttagcgcagtttcgacagtgtccgcaaattcatatgtaaggcttcctaggtctccgttatcatttgcaatgccgacaagcagattatcccacgctgctctcatcatcccgacagagccttcaatggttgttgcggcctctttagcagtagtgccagtgattcccatgttctcttgcaccgcatggatagcagtaatcacatcggagaatttagatgggtctaatgcctgtccggtcaattcctctgcatccgcaaccaggcgttccagttcggactttgtgccaccgtaccccagtttcaggttgtccagcatagcgtagtttccgcgcatgagggattggtaagtctgctggatgctctcaatgtccgtgcccatcttgttagcattgtcagacatatccatgatggcctgattggcgtactcagccgccgcctgtgtatccccgcccagagattggatcagagaggcggaaaacgctgtcgcctgctccatgtatgtgtttgcagatacgccagcagttttatatgcgttcgacgcatattgctggatcgtatcggacgcatccttaaacagagtatctacgccgcccacaagctgctcatactccgcatactggtcaatagaggattttgtgagtgccgctactccagaagcagccgcagtcaaagccgctgcgcctacctttgctgccgtagacaggccgtttttcagtttgtcagcaaacgactctgtatttctgctggcttcgtctaggttatcatcataatcacttgtatccagaataatccgggcaaataattcaaacaggttcagcgtctccaccccctatccgtgcgattttttctttcatgttcccgatgatctcttccggggtgcggttttcctccggcttcggtcgaataaggtcgtaatacctgatcttcatataactgccgccggagtattttgcagtattctccgcaaggattttcagcacgtcagttacatagacccggtacgccttttctcttgcgtcttgttcaaaccgtgcaaagacatacctggaaaatgcttttacactccggcctcggtactctcccgcgcagagccagagaaatccccgctctgcgccgagataaaaagcgtcgtaaatgcttcgtcggtcagcagatcaatcgtgtccttgatgagcttgacgaggtttagcgtgcctgtgtatgcctctggagtggtcccttcgatggtggacaagatggagataatgtcgcccttgtggcccttcaggagggcaggagcggcctttcttgccctctgcaacaggaatttattggccgtcatgccctctgggagcttctcccgtttgaacagctccgatgccacttcgtcttctgcaatgttggctatcggatcgataatgtcggcgatcacgtccaatgtccgctcgcccttgatatcagacagtctcatcaggtgctttcctccggtgctgcagagtaaaattccataggcatggtgtcctgtgcgtccatggacacatggccggtcagctccacagagacctggcccttgccatttttggtggtctggagcgaaaatccgccggtggaaagagcgtttttcaggcaaacagcaaccatgccgccgtctgcccggtcaccaacccaccagatatccttgaaatcggtctgcagcagatcccggcgtggagtaacttttgtggtatcgggagagccgatgtccgccgctccgagggccagtttgattgcttccggggacgtgccaagcgccgtaaaactcatagtgcattcccaagagtccaggtgcttcagttccatcatgttcacggggcagttgtccacatcctcgcccatatcggagtaagtgggaacacacgaaatattgataccgccggtagtagcgcacacaatgtcttcatcagacggtgcgtccggtgtggacggatcaaaacttgttagaattacaccggcgtccatctgcagttcctcaaatgtgctctgcgggatgacagtaaatttgcccattttgggcctcctttcagctgaatgtcagatattcagcggtaatgttgatgtaccggcgcttaatggccggatcttcttcgtaaacaacgctttgtgcaaacggagaaccgcgtttcagccagatataaccttcatcgcaagggattgtcacgccgccgtatccgatgcgcttggacagctcttgtgctgcctcgtccggtatcgcctcactctccgtccgaaagaacagattggcagtcaggccaacttctccggcgtcaaatgcggactcgatatactcgtatgtgccatagggcatgatcacatcgtccggaacagaggacgcacggtaaaacgggatttccccctcgttgaaccaggcataaagggctttgttcttggtcatgtggtcaggccccatttctccgccgtgaagtatttcagaggcagcgtggacgatttaggagcaggcttttcctccgggttggaggtcacacggtaggtctggccggtctccgtgtctttgaacacatcgttgtactcgatggggaaatccttgtccaccagcgcggaatataggcttgtgacaccctgcttttccgcgattctggcctccatggaggtgtccagcgcctgatagttagtgaactccgccccttcttcccattgcaccatgtagccgcctgctccatctggcacacgctttttttccatcagcacgcaggtgcgtgcaaaatcatcaagcaaagacacgttctcacctccacgggttgtctttgtgcggctccggcggagtcatatgcgggttcgggtttgcatactgccagcttcccgccggtttcttccagggggcaagctgggcggcaaacacgtccctccagcccacggcaacgccctttgagtttgtggccttggaatagctgtacccgccgaaactctccgacgtgtacgccccgccatccccgtttttggccgtccaggcggtaatttcctctaccgtggataacaatgcttttggaatggccagcgcccacacagagccggtaaacgtctcatcggtcagctccgccggatactgataaaccccatcgttgaacaggctccccacaattcgaaaatactgcccatttgcgaggaaaggcagcgtaatgccgccgtcctcgatgatgtatgtatcgtcataccggcccacggcgaaccagttgttcagatacatcaaaacggtttcaagcatcacgccgccctcctatcactttctcgatctggtttttgcttttgcctgcggttcaaatgttaccccagagaatttgaatgtcacaacgctggcatcgtccacaagcacctcaaaggtgtcattctttgtcacccggaatacaatgtccgggtcaaaggcaatcttgtcctttgtggtctctccgtttttcttgaaggtcatattggtcccggttttggtcaggtggaaggggaagtaatagccgctatcttcacctggcaaactgctgaactcggaatacccagtcacatagtgaaatgtaccagttacagaaccatcggcttttactgtcagatcatcaccgaccaattcagatacctgtttccccaatagggtctgactgctggggaagagcgttaaagtgtcagacccgattaaccccccgccgatacggtaatcttggcaatgccatccagatattcagcccaaagcttcatgcccataatggcgtagctctcgcccacagcggtggagtagttgccctgggcgtggaacccgatcaggttggtctcaccctgagtggtgtagttcaggcccagccgggcaaactcgctgtcgccgggatcgatgtagtacaggtcgatattctccacaggagtcgccagaaccgtattccgggcaatgccagagccgccggagatcgtggcgggcagcaggaacagcgtggagtaacccatgaaattctggatgtagttgattccaaactgggtctgcaccgtgatgtcagcagtgcccaggtagtcgtaagcatcaagaatattggcaaagccaacgacctgagtcacgtcctttgccattccagcgaacttgtccagcaccttgccctgagcctgggcaagagcggcctgccaggtggtagcggtgccggccagagaaccggtgttcaggaaggtgtagaagtcacccagcaccacgttctggagcttagtcaggaacgcatcgtcggacttctccacggcgatctccgcgccgtacttgtccacatcctcaatgggcacagccttggcgtacttctggatggtgatgtcatccttcttggcctgtacgatggtggtcttggaataggggattacctcgccggggcccacttcgccatcctctagatccacgcttgcggtgtaagagatcagctgagtgccgggcgtcttgcggataggccgcataatgcccaagatgttccgcagggcctcccagttgtcattgaaccgggtaacaaagtccacctcgcgggcggtcacggtggtatatacattggggagcgaatcgcgaggggtagtaaagctctcaacattggtagctgccattcaattcagtcctttcaagtaatttgattttccatgagcgccttttgacgctctgcggcggacaaaacataccgtccatggtcatcctttttgtagatgtcggcctttgtcattgcaccgctgttgttgtttgccgggggattggaggtctgcgcgcccctggtctccgtggtagtaataaagtccgcccactcgctcttgatgctctctgtgagcttgtcagcgcccttgatggcccccttgtcgtccagctccacgctgtccacgtcggagaccttcaacacggattccaggcgcttctcgcttaccccggcttcttgcaggagcgcccgatatgccttttccttggccgcgcggctctcctttttggtctgctcggtcttgtagccctcgaattcctctttcagggcctcatacttgaccttgtagctgtctttctttcccgcttccagatccgcctgcgccttttccaactgcttctgtacttcgggcagggcttctgcgtcggccttatacttcgcaacgtccgctttcaggccgtccacggtctcgctgtgcatggaaatgatctcgtcgatcttttcctcgtcgatgcccatcgctttcagggcacgtctggtcagtgccataatcagtctccttttcttcggccccagtacttcgggggcgactgtgatataaaaaccgctgtactttgcgggttttaccaaataaaaaaggagccaacctgcaagaaacccttacaagttgaccccaacggtccttcccgctcaccaattagagcagggttcagtgtttacttttctaaaaattcatcaagcacccttttcaatattgaattgacgctggtcccttcttcctttgctttttctctcaccttgtccgcatattcctttcggaccttacaccctaaaacagtcatgtgttcagcaatgtatttgttattcgctcttttctgtgcctctgtgagtgccattgtaccacctccaaaatcattttacatgattttatatggtttaacaatgtacaatccgcacaatatatatggttaaactttgcgaaatttgccgcttgaatatatggttaaaccatgttatattatactcacaaggaacaaaccacgacaggccacaggccgggagggaaagaaaatgaaaagagtgcgcatgacgcttgatgaaattcgtgccgagtctacatactacatagagacacatgacaaatccgccggcatatgcacattggttgatgttgagaacatgggcttttgtaaagatggtgttacccgttggtatcatttcacaaacgacgaggggcaacccgctgtatattacaaatactgaaccacaccacccgccccggaggtcacgagggcagaaagggaaaaagatgaacaacacgagatttaacaagttgtgggatttattgcacaagtccggggaagtcaagttcgctgattgcaacgaatctctctcgctatcgctcgtcccatccagatatgggtatgaagtttctctgcgctctggtggaagcacggttcttgtgcactatgacaaagaaagatttcgtgaaatattagttgactaatgcctttcttccgcccctaaccggggcggttttcttttgcctggaacttgatttcccgcttgtcctccagaacgatgtacccatctcctttttttcggactacggcgtcgtttcctttggtaatgatggccttgataatggcccatgctttttcatccatttttcagttcatcctctatgatattccggtaggtctgcgggtggtctgccaccgccggtttcaaaaacgggtgtgcttgattgccccttgtccaatgccagttgccctgtgcgtcctggtacacccacggcgtgggccgtccgcctccgccctccgcataaatgccggtgcctaattcctggtaaacgccgtattcgacgttcgtcccgacgtaagcggccatttcatcttcagaaactgcgtgtgaaatgccgtttctaagccgcccagtgtcaaccggggcaaggtcctttgcatacccttccgcctccatcccgcagcgctccaaggcccgcaggcaagccgcgcgaaacgcttctcccacctgggcggagttgtttacaacgtcaattcgcatttcgctgttattcgccacggcttttcacccactcttcccattcggaataggtcatttcgttcaccaacacatagcgcccatccggcccttttactcgcatttgacgaggttctgcctctattccctctttttcgacggttctcatgctgcaccggcagttatacagatcaccgggctttgcgccttgcgggtctcccgggaacatcatttcgctccccaggtcagacacaaagggcttgtcatagtcaacggttttcccgtccagcatggcgtgactgtgacgggtcctgttatccttagtcgctatccaccgttttctaaccttgatccccatcttagccgccgccacatagctgtccatcctcccggcgttttccgcgcctgtgacggcggttctagccgctctcacggcgcttgtccggttcatgtcagatatccggttttgcaggtcatcagctatcttcttgatactgctgccctgtaagatactgcttgtgacgcttgcggtgatctgctgtttcccataggccaagtcgataccacgcttgacagccttttccggcggatagtatggcatcaagtctggttcttcgatgatcaatcgctttacggtctgttcgtcccatagtgtaaaccccacatcacccgccgcttgttcaatcgtgtatgcggcataatttcggttcaaggagtagatcccaggcgtatcatcattgacataagctattgcggtttcgtttgcctttgtgtaccgctccgcaacctttgtggctagatcatcaaaccgttctccacgtccgatctggtttaagcgccactgtttataatcttcttctgtccattccttaccattttgaacggttccgatcagctttttcatctgttcgtcccgttcttggaagcgttcaaagtagtcgatgactgttttttcaaggtcatcccaggcttcccagtagaccctcgctattctccgttccagccgttccagttcctgatccgtccactggtgccccaggtctgttggcattattcgtcacccccagcctgtccattgcttcggcatctttccgctccaaaatgtcatctacctcatcgtttgtcagccaaggcaaatgacggagaatggcttcagagtccaaataagtagccgcagtcatgaccatctgcgtttcttcaagttggtttgcaatgcggttccactggaaagacggcgtgtcgtcaatgtcaagcaaagccagcagcttcccgataaagtcccggatgtaatactcaaaatctccgcatttatcgtcttggctttgatatcccattcggatggccgtggcggtcaggttcccgctcatgatcttatccatgtccacaagctggaaatcctcgtacaggtcactccgcagccttgtaagcatggcctcccgcgcctggtatggaacgtccagtgtatgagcctctgccccgcctccgtcgtcgctgtccaccgttgcggctctcaatgtccgcatcctatcgaggaaccgggcgatgtctacgtcatccatgccgccggagtttttcaaaacccagtaaatgccgctggaatcgtcaatttcgttggcaagcccagacttaacgaaatcgtaacagtcaatggactcccgaattccaaccaactcactttgacgaagatcattggcatacatgggaatgatcggaaatccagggtaattgtcgccgctctccacagtttccccgtccacttctgaccggcggatcgtctgccgataggggcgcttgtcttggcttacctgtatgtcttcgcctttacgctggatgtactctgtgtatccgtccagctcatagagggtataacgtttcgtttgtgtctcttccaggctccaatagcgaattccggcctttagaaaaccatcgtcctggtcgtacagcggtacaaatcctggctcattcggagtatcagcgtagctaaaaacttcaagatggtcatagttccagaagccaaacgccaccttgtccaccatggctttcttagccatttgggacagtctgctatcaaatgtctctccaagccgctctttcgtgccatcctgctcgaaggtaacgccattagaaagcacatactgcacctgctgaatgacaaaccgccgaaaaaacagggtttttagcttgtagttcgcagaaaacagatcaggataagcctgcccgttggctttgtacaggaatttctggaacttctcaatggtcaggttgtgctttgcatagtacgcctccgcagcagcggcaatcttataatcatcgctggaagtatggtcctgaacggctccccgcacgaattccatgcggtctttttcgttctcacccaccgccagcaggtcttgatatgtcctcaacatctcacctccgtgcataaagaggtatgtaagtattttttgcctgttgcccaggccgtctccagattggctccgtagcatagcggacggcgtcaatatggtggttgtctctatcaggatatccgctgataatgtcgccgtctttcgtccgctcgtattcgtattccataaactcctcgcaggtatccggacagcgctttgggtcaatcacaatagatttcagggattgcagccacttcatggaatactccacacttccaggccctttaatagcacccgtgcagtgcaggccgaatttcttatagtccgctacacttttcggctccgcgctgtctgcaacaatgcggtcctctctggtcaagcccttttcaaggagtagatttgccgtttcttggttgcccatcttgtttcgagtcagctcatcgaagatatacagcacacgccgtgccgcgtcataatggcagcgattgaatgcccacgggtccgggaaatatccccagtccacgccgttgcaaatccggtcaaatgcggaaacttcttcgtctgtcagctctcgaacgtcgatattttcaaagacattcccgcccgtaccaaccggaatcccgagatattcatgctgatatgcccgctcgtccgtttctttgaggtattccgcttctcgcaggaactgttcccccaaccactctggcggggcttccaagtatgtggatttatgacacagcctgtccgctctctcttcaaggctatctttgtttgcccagttgtcccggctgatcggcgggttgtagctctcgaagttccagaacttagagccgccacgcattgtggattgaagaatggttcggatttccgcccgccctgcaaactgatccttttcctcaaagtgggtgacggcgatatatccgaaaggcaccttgatagacttgatcttcatggggtcatcagcgccacgaaacataatcttctgtcctgtcggcttataaatcagttccatcggctggaccttagcttcccaatagtccgccattccaagttcgccaatggcccacagatattgagcatatacgctgtctcgaatggtgtttgcaaccttgcgcaggaccagcgcatgtgtccctttattggtcagtagaatcaacggaacaaggagcgaaacgcaagatgacttcagagagccgcgcccaccagacagatcataatgagtgtggccatgttggaacacatctcgagcaagcaagtggaacgctgggccaaggactgttgacaatctgatttcagacatcgattaccaccttaacctcgtcctccgttttactttggtctcccagcaggtcaaacagcacctttgccgccttggcgtctcctttagcggccttgatggacagcccggcgatgatcgccatttggttgtccacatcctctggggcaacgccatctttggctaatttgttccatgctcttttgtcggaaaccggcagagacaggtataattccgccgcttctctcaggcttttcttgcgtcggcgggcttcgccggatgcacgaccgccttctcggcccagctctctggcttccttctggcttctctggtccatcggtataaggttctgttcattcggcatatcacctcacctacttcaaatactcttcaaacagcctcctgaacagcactctggcctcgtcagggttatctcgtgtcctttcatccatcccagaaaatccgcccacagcgcgtctgagcgggctttacgggcttccaggtcttggtcaaactgtcccggattgtatccgtacttgctggacacttctccaatacgatgacgctttatctttgtttgcatccccgatcccgtccctcccatcttttcagcgagacaggcacgccctatttggcgccgcatggagggcgcgaccctccggccctgatcgtgggctgatacgctcgtgcggcatatttgaagggagtcccccggcaggaaacgtacaagagaggtactcctttccgtttaatatctgctcactagataccctgccgggggagtgggttgtcctttgggccgtggttggtcacagcccgaaaggggaggaaaaagaaggagcatggggaagtcactccctcatgctccattgtcgcataagttcaactggcaattcctcaaaaaggaggaattttcaaattttcttatgagacgataaaggtttaactacgcatggatagtctgttcgtccaagtaagtaatctgttgacacttcaaaataatcagctattgcctccagagcgtccgtccctggttttctgttcccaagttcataccttctgatttggtcagacgatatcccgcacagctcggaaagcttgtatctgctcagcctgtttctttcccttaaccgcctaagccgttccgggaactcattcaccgggcatctctcctttcctgtaccacttcatgccggcgcatcgccaagatgtattgcaggccacggatatttgactcctggcaactccaagggcctctgcggcggctttttcagacgggtattcagtaacggtcccatcattgctgacagataccaccggcttagctggcatcgtccacctccgccaatgcgttaaactcgtctctgttaagcggctctgtcggtctttcctgcggtgctaatcctcggacccgcaacgccgttaaaatcgcatccgtgttaagccccaagaaagttgatagctgccgcatggagtacccctctgcgcgtttgagcgatatccactcccattgcgcatcagaatacatatcaccagggaaatggtatctacgaaccatccatatcctccttcttaatccaccaccgtcctgctccgcttcgatgggggcggagatgcgggtccagtcaggcatttccagcacctccgatgatctcgtcaagggtatatacatgacccttttcaacagacgggaacagatgtctggtgattacttctctctgaaaatatgtgccgtctacaatttccaggcactgcgtccatgcaccatcgtattttattgcattgatctccgggagcaaaactttgattgccttcgccctctccacctcctgctcggtgaagcggggcttgcagatgatgcaatcagcgttattgataatgtaacaaagttctccggaggtcacttctccaccatgtgcatttctgatctctccatctgtaccgacaaaataacttttcggctcatcaaatgggaagtcattaaactggaagttctggtttacctcaaccccagcacctcgcaaattctcggtttgtccatgttggcctccaaactttcacctttgctatcattttttgtaagtacatttccatcttccaccacctcatagcccatcaggcgagcggcttcgtgagggttggctcttacgtattcatgacacggcctctttgtccctgcgtattgctgcacgggttcccgaatctcgcaatagtcgcaatcttctttgctatcgcaaaactgcgctaatgcctgttcaatggtaagtgcgacttcgcccgtcttactccgaaacttcatggtcggcctccttgcccatgcgggcaccacaatgacaatatggttcttcttttagctcctctcttccgcataagctacaacgaaatgatgtgtattcatggagaataggatccccattctggtcatattcaactggaatatatgtatgatggatttctggattccatctcccgtgtcgcaccggggcaacgtcagcggcggggatgcctttgattgctccgccaatattccaagccacggtatcgccgcaatagtctgccattctaagccgatcttcatattctttctggcagatgtcgagtgcttccgccctctcgatgtactccttcattctctccacctctgttcgtggtcgtctgcaatccgtttaatgatttccagctcttcatccgtcagcgtccggttccacgcaatggaaaaatcgcccgtacaccgattcgggcaggccgtacactcgcagcggttggcgttgctggtatcattcaccctgaatgggcagctgtggttatagcagtcagttctaatccctaattcccgttcgacaaattcagcgggatacatcggcggtatagttttattctccatcctgctcctccaatacggtcatatcatagccgctctctataaatcggatcgttttttgatggtcgcaagcgttcccgagataagtgtaaatctctcgcatatcctccacactgaacctagtgtcaagatattgatttataccattcaggaagaaaatatgaagggctgtattatctactgcacggcgaaacggcgtggacttacaagccgcgcgggaaaaccactccaacaccttgcactttacatccagttcgctcttgcaagtgctgatattgaaatacacatttgccttttggtgggcgataaactccccctgggcgttgatgaaccatccagggaaggaaagcccaagtctcctaatgactgcccaatcaaccatcctgctccctccgtagtgcggcctcctcgcgggtcaggaaaacggttttaccgctatattcggtgttgccaattttgagccgccatttcccgccgtcaaagtatgtcagccgcttcatgtcagtcctcctcatactccgggtgtacgcccatgcaacagtcaaagcaaatccagccagtgggagaacattcatctctcaccatctcgctctgctcataccgttccccacagataccgcactttcggtagtatttacgctttttcatgtcagccctcctcgccgtcccacttccatgcggggcaaagtttgtgcaggtcctctactgccgcatccctctcccgcttcatctgatctctctgattttctacaatttcaatacaccgcttcacctgttccagctcggcccgcagctgctcgttttcggcccggagcgtggagagggtggtggcgccatcaagtgcaacgcctcttttcaggtccttcccttcaaaatatccgtttagctgctcaatcagcttctcaatgtccatcaggtgtccacctccactggttgcttcatccacttcaatgcagcttgcctgcacccttcataaatcggaatgtttggataagcacagatgaaattgcatactccgcctttttcatgctcacaacacttacaaaagtcggctctgagaaaaatgtccgccagttcctcgtcgctcatggcccggattttatctgcgtttgtcatgtttcatcctctccctccggcgggcggcggtaaaacacccaatgcgggatttcctttacattgtaaatgctacctgcaggtgtgatgatatgcccatgctggcacagacaccagtacccgttcccgccctcgatgggtttgcaggcaacccacacaggctcgtccatctcccgcagttcctccagcgtcagcggctcgttcggcggggtgagggtgggcgtgaagtaatcacacccatccgtacagaaacagcttgcgttctgcgattctcggctcgcccacagcgcacataccttttcgtgcaggcacttcttgcaatcaaactcttccatctttcagcgcctcctcagtcgcaatcatctcgattaccggaacaacttcaaagtctctgtcccacgaagaacagccgcttctagcctgcgcctcagaacgatatgtcttgacggatacgtcttttatttcggatatgggacgaaaactaaaagcctttgctagaccgcaccagacctctgttctgtttttccgcatgaccacatagcgcttgcgctcaatccgcatcgttcaggacctccatccttttcatcaccatctccacttccatcttgatcccctccagcatctccatttcctccgcgctcagaatcggcgcgcgggtgttccaggccaggcgggcttcgtgttccgtcttataccatccgctgttcgtaaaacatttcatgcagatcacatttctgcggacatttggctgatagtaacgttcgttccgcacccttgcctgtcctctgcacataggacatggcaccagcacccccgcatccgtcagccgcttcgcagcatctttatttccgagcatggctaatttgacgtcatccattacaaattcctccccattgttctgccattgcctgagctatgcctggaaaggtcttggcccgattcttctgtcggtctttcccacctcgcatgaaccatgttccagcttcgtgacagctgcatttcgggtcaacaatgttagttggctccaaaggaggaagtcctttcaaccacaggcgggtctttttctgaaccgggtgtccgaacatccacggctggacctcctgggtgtgcggcggcatttcataaatcttgctggatactgggttctccacacagatgtgcgggcagtcggcattcagaaacctcaagaaaaatgcttttgcctcaagccctgtccgatagcgctcctgattgagaacgccccccttgaacaggtgttttgctccggcgttcgacagatatgtacaaggcggaaacgccagaatcatgtcccactgcattttcagcatctccaacgcgtcacattggatgtgccactcaggatggcctccgctgcacggctcaatgtcgcagctgtatgcttcatgccccagcgccctgaatgctttgcacacttcctgagactcttcacaagccaccagcactctcatagcttcgccgcctctttgtcgcccagcagggcgcgcttttcatccgtcatagtcctaaatcctcccatgtgatctgccgttcttccaggtcaaacctggaccccatgtaaatgatgttgtcatctgtccggaaccgcccagggaaagcaacgttttccacgtgttggagctctaagagcttatcccatagctccctatggtgtgcccgcaaatgtcggaactcattgtcactggtatttgggcagaagaagcacccgccacgcttacagaactcataggctggagagaggagcccgtatttccggcagagttcgcgcgcatccttctgggtgtatccgtatttctgcagcagggatattttctgcccgcccaggcgcagcagtctttcgtcctcgtctgctgcatatccgatatactgtactgctcctttatgcgcccggcgaaaccggcccagcggaggtgtcttacagcgatcttgcaccttgcaaaaccccggcgacgggaatccttgatactttccggcccgcaacccctttttgatctggtgccaaaacacgtccataaacgtcttttgagatcgcagaacctccacgcgcacgccatgttcctcaaaccacgggattgctatcccgtggataaaatctgcatgttccgggacctctccgctggtatgcgcatcaaacatgacctcacagtataccaaggctgtcaaaggctccccgtgctcgagagcaagcagggctgttgccgtactgtctgcgccgccggaccatgatgcaaaatgctcagtcatgctctcttcctttccagcgggcggctctcatgcttccacctccgacggatagactgcgtactggcccttgccgtaacgctggtattgggacgccatccgccggaaggactggtattggatgcccagatattccgcacactctcgggcggtgccctcaaaggcgtattgcccgtccttgccgtagatggtgtacatcttcaggcagtagcgacgcggtatccgcacacgcccatatttccgggcccagatgctgacggtcgaaacggacacattgaccgctttggcaatgtccttctggaggcatccccggtccaccatctccagaatggtttgcagcttcttagttgtcatgacttgcctcccattcccggtacagggaaaaccagtcctccgcccgcatcgtcaccagccactcgcagcggctccgccggtgggctacaatgggatattcccaaggaggcgcatcgtgcttggcctgggccatggctgcctccaaatccagccgctccacacgcttgacttcctgatggatgccgggcagccctacaacgtcagaggcgtccccggtgttcccgcaatactgagccgtgcggcggcagtcatagccctgcccacggcaatagctggcccattccagctctccgcgcttgcctttttgtttgctgttcatggttcctccttgtggtgatacatttcccggatgtacttccacgtctcgtcgttcatgctttgggcagtaggtttttccttcccttcctgcttcctgcgcttttcccaggtgattacagcctgtttccagtccttcatgggagactgaccgatcttccagcccttggaggcgtagaaagcaacaaacgactctgggtctaccccgttgttccgctcctgacaatatgccctgacttcatcgactgtcggaggtgaaaagcgtttccccctggaagagggggtagggggagtataactatcgttctcattctcttcctctctctctacctcaccctctacctctatctctccctctatattgctttccgtttgcttccggtttgctttcggtttgcttccgcctcgcttcccgtttgctgcctttttgcttgctttgtcaagtatcggttttacaagcaaaaaggaagcggatgcctgtcctgttaatggcttgctttctccctcgaacacataagtacaaatcgccgtcacaaagggaagctggtccttcttcggaagcacttttaacgcctcccagaagctgcggtaaaaggtaaattggtcacgttccaagcagttcacccgccttaaaacggcagtttgccgtcctcttcgccgatctcggcgaagtctgcggctgagacattgacgccgccgctctggatggggaagtgggactccttttctgtgggccacacatagtccgctatcaggtctgtataggttttgccgttgtactcccggctctccagccgcccggcggcgatgacccggtcgcccttcaccataacggacagctggcgggccagatgcccccagcccttgacagtcaggaaagcggcggttccgtccttgcggccataggcccggacggagatggagccgacctccttgccgttgctggtgatgcggatatcgccgtcacaggtggcctttgcgatgacgagtccggtcttgacctcgttgccgctgcggtcatagtccgtaatgccattgataaacatcaggagtcctccttttgcagagcgtccaccagggcgtcgaagtcgccggacttgatcttgctggcgctgtcgtagccgtgggagcgcaggaagtccttggcctcctgtttggtaaatccgtggcggctggcgcaggtgtagaagaacttgacctgggcgggggtaatgggcttttccgggtctttgtccgcgaagtaggccccggcatcctctgtgtcgctctcaatgtcctgagtgaagctgtcggacatgcatcccagggacagggcggcggacaccagggcccgcttctgtgccatcttcagggcgctgttggcgccgtcgtagggggactggctgccggtgcggccctcccgggtgttggcggagccgtaggagctggtaatgatgtactctttgccatccacgatcttcaccaggtcacagcggacggcatagaagaagaatccagtctcctggttttcgatcttgctctccatgtggtatcgctggcagaggccgtaggctacagcaactttttcggcgcctgccttgaacagggtggggtgcttcgtcatggcctccccgttcttcttgcggatcacgccgaagtcgatgccacggcgtagggtctccggctggcagccaaacacggagatttcatagtccccggtatggggcttgcgctgcaccgtcaggggcgcggcgttatagctgtagagcattatttcttcactcatgcgtggttcttcctttccactgcctgattcatgaacagacagattttcagcagttccaggtcatagcggacttccgtgagctcataggtcccatccttggagagtttcagagcatagagataatccggggtactatgccatgggggcatcaattcttggtaggctgtcagctgggcccggagagatgggccgtggagttggccagtcttgatgtccaggatacagctgcggccatcatagagcgtcccgtatcggtccagcgttcctgcgtaaccaaattccagattccccatggggtgctcgatcagctcccagtccgggcggtagtctttcaggaagcggcggtaggctttcagatacccggcgatctccggcgtttcctccggtgtctcgccatagtcgatcagggcgcaggcttcatggacggcggtcccccggcgggcggcggtctccgccagccacggcttatccgatttgtagtcgtatgccagaaagcggcagatgtgggtaacgctggggagttccacgccgtccagggtataggtatgggacttttcatcaaactggatcaccggaactcgctcctttccttgatgctgcggccgtccagccactcgtccagctggtcctcttcctcttcccggagagtgtcggcgaagccccggaaacgggatagaagggagcggcggcaggatttgcagaggatgaccccagcgggcatatagtctttgcagatggggcagacggcggcgtcctcgatataggactggccgcagacgggacacagctcctcccggtagcggtagccggggaatacggtggggtccgtgccctcccggaccataggggcgtcaaagtaggcattgcagatttggcagtgcttcatgactcgcccccgatccggaacgcatcttccgcgggaatacccatgagacgagccacactgtcccggaatggcttggaggcagccaaccgcccggagagcatctggtatgcctgggcgtatgagacgctgcccacgtcctgaatgaagctcttgaccacgccgccatagttttctacaatgtaccttcggatgaccggatacagcacggacgggggccggggcgggattcggatgcaggccgataggtcattcttgatggtgcagtccgcgtatccgatttcccgggcgatctcctgccagttgtggccgtcgatccgcatcgtgaatgccttgatacgtttttctcttgtcaaatagctccctcctcgatgaaatagattgtagcggtacggactccggcctggatggcggcctcgtggctctccatgcagaggtcgatgtgggcgcctttcacggcgcttccggtatcgtccgcccggtaatagtggagttctccgtctccgtagtccaccaggacatcagaacccaatgggatgatggacgggtccacggccacagagacgccgggcgtggcccttctgccgctggcggtgatgccgtcggacttgccgcagcagcgggagcaggtgcagtagtgggtgacggtgacatcatccaggcggacggcatgggacagcagcgccgcctcgatcagctcgttttccgcggcctcctgctcctcttcggtgagataacagcggaccagggccggggtatcgtcgccgggtaggctgccgtcctgcgtggcgggctccggcttgtgcatggcgggccgatctgctttcaccgtcataatcaggtagcttcccagccacgccagcagcaagatcagaaataggagatatgtaatcagctgccgcctctggctccggcgccgccgctcttcgcgggtcagctttttcataggatatgcctcaccgcttcttctcgggtaatatagaaatggatgcccgtgctgcactcgttccagcggttttcgtcgaaatccgaaacggagaccacagttccgggaatgtaatggaagttctcatctctatcactgacggcgacctgctccaatacaatcccctctaaatcctgaatctccaaaacggttgcctttgagcagcggcacttccggcctgttccggaactgcgcacggcatcttcggtaatttccagctttacaatgcactcatgaccgctggttttgacccttgcctttttccagccgacaaaagcgccgatttccgggcaggcaatgggataaaataaattttttgccttttcaatgtagtcggccctggacaggtcggccctggacaggttggccccgaacaggttggccctggacaggttggccccggacaggtcggccccggacaggtcggccctggacaggttggccccgaacaggttggccctggacaggttggccccggacaggtcggccccggacaggtcggccccggacaggtcggccctggacaggttggccccgaacaggttggccccgaacaggttggccccgaacaggttggccccgaacaggtcggccctggacaggtcggccctggacaggtcggccctggacaggttggccccgaacaggttggccctggacaggttggccccggacaggtcggccccggacaggtcggccctggacaggttggccccgaacaggttggccccgaacaggttggccctggacaggttggccccggacaggtcggccctggacaggttggccccgaacaggttggcccgttttccgccattttcgcctcgtagccatttaaagtgcttgtccaaaatatttttcaactcttgttcgtccatgcgttattcctccttgtaggtctcccggaagctgccttcggggaaatcgaactccacggtgaaatgatggtgccgctcgttgatggagactacccggcagggatgcgggcctgtccttgcggtcacaaaggcgctggtggggatggtgggttccaggcacagcttgtctccaatgttcatctgtggccctccagtctgtccagtatccagaagagaccgtttgtcagggagatggctccagcggtcagaacgatgatttgaaggatcatttcgacacctccgaaagactccgggccagggtggcggcggagattttggagccgttgaaggggaagcggttcttcaaagtgctgtatttcttgatgccggtgaatcgccggacatcctccagggacagcaggtgccgcccttcggtgaattctagaatgtccgcgaggttgtcgcggtagtatcttgactcagacattcgggtcctccttttcttgatggtcgtggttgctgttcgggtctgacgggcgaaggcgcagagcctcgtcaaaggtcatgccgtaggccgcccggttaagcttgtccatcagatgtttggtgttgcgcgcctgggcttccaggtctttgatgctgtctttttcgttcataaaaacctccttgtcatttgacccggaggcgtgtataataacctcgcgggcctgttggtctactcaataggttccgcagccctcgtcggtgtcgctagcactggcgggggcatctttattgtcctttctccctgaatgtgataggatgaggggagaaagggggtgagccttatgtctaatgaaactctcaagacgtttcctgatagctatgcagaggcacttgcgatgctttatctgcaaaatcaagaccttagagaaaaaacaccgtcagaaattcatactatgtatcaagaagcgtactatgaaatccttaaagaccaccgaattaaagctaaatctggatggttcaaggatttaaaagcaactgactaatgctaagcattgcattagaaagtgctaccaagtcgctatctgatatgcacttcttggaacgctcggaaagtagttgcagctgcttttcgagcgtctctaatatctgctgattgtccatctctctcacctcccctcacccttcgccctgatccgaaagaagcttgtctacggtgacgccgtagagctttgcgattgcagggagcatactagctctaggaagtgatccgccctgttctctctcccaaaggcaaacagcagaatcggaaataccaagtctgtccccaacttccctttgtgaaagacccgctttttccctgcattccttaaatctcaaaatttcacccccaaaacgcttaatattacttgacatcttgggctgcaccgcttaatattggattgtcaggacaatagaaaacggtgcaagcccaatattaagtgggcctggttttttgtggcttaatcacttaacaatattaagtatatagcattggcctcttaatgtcaagcccttattcttaattttattaagtgattttgaaagggactttatggacattatttattttctcgctcagattgataggctccgtaaagagcgaaaaatgacaaaagcagaattttatgaaaaggctgacgtaacagcatcagcggtctcccaatggagaaacgagaaaactgttccagcagaaacgaccatccaaagaattgcagatttgttcggagttgaagtttcttttctgactgggcaaaaagaaatcccgcccaccgaaaaggtagacgggatggaagaagaacttattcagattttccgcttgttgcctgatgatctgaaagcgggaattctggctcagataaaagccgttctagttcagcgtggattacttccatcgcagtcagaatagcggcctccttgtttgtgcttttgctgataatctggatcaggtctttttcaaggttcatccgacattcctcctttttgtttacaatatatgcttaacgttgtgtcgaaattgcacagaagcgtgcaacaaaaataaaattttttagagagagggaaaactatgcaatgccctaaatgtggaagcgaaaacgtcagcgttcaaatggtaaccgaaacgcagttagtagacaaacatcacgggattatatggtggatttgcattggttggtggtggatttttattaaatggcttgtgtttacacttcccgctttaattgtaaaaatttttgcgcccaaaaaacaaaaactgaaacaaaagcaaaaatctgtgtgtgtttgccaaaattgcgggtatcattgggaagcataaaaaaccgccgtcaggtctcccctggcggcgtacttataagggggtgtctttttgaactgtatacgttgcaaagcggagttgcctaaaggggcgacatactgtcctgcctgcggaaagaaacagactggcactcccccacggaaggccttgaaacgtgcgaatggcaccggaacagtttataagctgtccggccggcggcgccgtccttgggtagctgccaaaaataaagtaatcatcgggtattatgagcgcaaaacagacgctacagaggctctggaaaaactgtctggtcgggacttgtctgagcggtacaacatgacatttgccgaggtatttgaggtgtggaaagctgagcattatcaggagatcggcgaaaaaggaattgagggatacaatcgggcctttgctgtgtttaccccgctccacgagaagaaattcagggacctccgcacagcagattttcagttggccctagacccacacatgcagaaatcgcactccaccgtgtcaaagtacaagcagttgattacgcagatgtcacaatgggccatccgggaggaaatctgcaccaccaactttgccaaattcgtccggctcccggaaaacgtcaaaaaagaaaaagacatctttacagaccaagaaatcgcaaaactggaagctgataacagcgaaacggcaaaaatcgttcttatgctgatttatacaggtatgcgtattggggagttgttctcactgcctcttgcggactaccacggtgcctatgttataggcggagaaaaaacagaggccggacgcaatcgcatcattcctatccgtctagaagggcgcggctattttgcctatttcgcccaacaggcaaccgggccactactcctgtctggatataccggccagcgccgcccggaaaactaccgcaaacgggattactaccctctgttgaagaaactgggcattccgcagaaaaacccgcattgcacccggcacacctatgccagctgggcaagaaaacagggaatggctccggagaccttgcaaaaaatcctgggccatgcggattacagtaccacagcaaatatctatgtgcatacagacgcagatgaattgatacaggcagtcgaaaattgttagaaatttgttagtaaccgaaaaaagtttttaaaaattttcctcgatttaagtttcgattttccttgaaattactcggtttaaccattctacaatgttttgagaaagtataatactatatttcacacgcaggaggtcactggttcgagtccagtagtctccaccaaaaagttcctgatttcgcaagaaatcaggaacttttcttttgcctcaggctctaaaagttttctccaaattttctactttttctccgaccaatacactgaccaattcggggatagtttcagaagggacacagctccgggcgaaatgattttgcctagtggtgtcgtattttgttgttttatgttctaaaatcggactttctgcgcaaaagtttcttgtagataacaagtcgaaatgttatactaaaaataatttcaaaaacagagaggagtatccatcatggctgcgccgcgtgtttttattagttcaacatattatgatttgaagcatgtccggaatgatatcggagattttattagatcacttgggtatacgccagttatgcatgataggggcggtgtagcttatacgcaaacagacactattgaaaatagttgttatagtgaattgaccacttgcgatattgtaatctgtattattggaaatcattttgggactcaggcttccacaggcgatttttcaatcaccatggaggaacttcgcacagctatcaagaataaaaagaaaatttatattttcatcgctaaagatgtatatatagaaaaccggacatacatgcaaaacaaggattcgggcacctttaggcccgcatatgcggataacattaaaattcatcagtttattgaggaactgcgtctcgcaattaaaaataacccgattgaatctttcgaaactacaaccgatattgttaattccctaaaaagccaatttgctggattatttcagaactttttggctagggatgcttctttgacagaagctaaaacagcttatgatttacaggaaaccactgaacaatttaaagacctcctatcttcttttcataaagaaaccgaaagaatgtttcagttttggacggaaccttttttacaaccaacaataccatttactatattcgatctctgttgggtatgaaaagttccacctttattgttttagaccaatctgggttggaagaatttctgcaagtagttggattttccgatgatattgcagctccggatgagtcatattggagatacaccagagtacatgatggtatgaaagaaacaattacgcttgatttggatctatttgatgataattataaattattacgattgccaatgtctcgggttaaaaccctgattcagtgggaaacagaagatgcctcttctgttcaagatgatgaattgccgttttaatttctaaaaatgcacctttgtgagtgtatgtgctcacaaaggtgtattttcatattgccttccctatcacatcgcccatggtatccgctgcttctcgcatcatatccggcgtggcgtgggtgtaggtgctgagggtgaagcccgcgctgtaatgccccagggtgctggacagggtcttcacatccaccccattcttgagagacagcgttgcgaaggtgtgccggagatcgtgaaaccgaatatgctcggtgccgatggctttcaggatcttctcgtgggtatgccggaaggaatccggatcgaacattcctcccgtcttgggcgacgggaacatgtagggatttcccgggtgcttcttgtgctcctccaccagcagctccaccgcctgctgcgagaccggcaggacacggatggaattgtgggtcttgggctggctcaccaccaattctcccttggtgcgagtcacctgcttcgtgatggagatggttcgcttctccacgtccaggtccgtccagaggagggccagcagttctccccgccgcagtcctgtggtcagctccaggtagaagggtgccagcagtccccgcttgtccgcttccatcagataggggcggatcttctcttccggcagtaccttcatctcccgcttctccatctttggcagcttgcggcctctcgcggggttcaccaggatcagccgctccgccacagcttgctccaagcagttgttcagcaaggtatggatgccatggaccacccggacgctcagtcccttgttcttcagctggatgtgctggtaccgctgcacccgcccgttcttctggagatcgttgtagaacttctggatctggatcgtggtgagcttgtccagcttgatgtcccccagttggggatgatgtggttattgatgtaattcagatagtagtccttggtgttctcccgaagccggggctcggcatagacctcgtaccacatcgtcacccagcttttcaccgtgtgggtgccgctacggttcatatccagtcgctgactgtccgcgatggcctttttcagtttctccttgatctccgcctgagtctttcccaggacattcttaattttctgcttcccgggcgccgggtcataggaggccgtgtagaatccctcccatctactatctttccgtttgcggatactgccctcgctgttggcgcgtttcttccccattcatcatctctcctttctcgccagctcacacgcccgttgttcgtcctcgttttcaaagttgtacggcgactgggtctgccagcagctcctgttggataccctgggccagacggtaaccggagatgaagctgttgagacacgcttcctcccgcagagcgtcttccagatccgccatcttcaggagcagtttccgctccggctcatccagcagacgggtgagctgcctgtaggtccgttcgactttcctgtccagatactccgccctccgggatgtcgtctcgaacctgcagcagagggccttcatatagtcacgcatcatgaatcgcctcctatcagcgacacacaatactatgacctgacctcaatagctactccaaccgggcagagttatcaaattgttagcaaattcaggaccgcttccgaaaattcggaagcggtcctgaactttacactcacatatgaagtctcggtgatagatgctgctgttgctccataatccgccgatgcacagggaccatgattctttccattcgggcagacagataagtctggtaaaactgccgctgcagttcatccagaaaaggaacttctctgatgaaagccagcatcttatccagatggaatcgcggcatcatgcgcatgaccgccgcattgcagtccttgtttccagttgccatcaagaaatcatagtagttgattttccggtcattctgtttgatggcagaagtcgggaagcggtaaatccgggcattcagctcatcctgatttgacaagaccgcccgcatcacctgggcatctgcctgcggcagcagacagctgccgcaatcatagattggggccagcgttgcggtctgggtgtcatcgtgatacaggaatccccagtttccgttgtgtcggtcaaaattccccagaagcgcatccaccacaaagacattccaaaagtgttgtagcacttccacaggattcacgtactgctgtttttcaatggtatccagaatgtcctccagctccgttccggtgccgccatattcagaatcgatgacggtattcttgatggagcagaagtcaaacagcttacttccgtctgcggtaaaatctttgcaggcgcagacgatcttcgtctttccccccacatcatacgttcccaggatggtttcctgcgcggggatcccaaccatgttgaagatggtgctggcgatgtgttcgctgatacagctattcgtgtaggacagctccgttctctttccctgaccggaaggaggaaatttcagcatatattgctcgccctgatgttcgattgcgatcttctttccgttggcaccgttataagcacgtccgggcacacgcttgcagtttgtaaaatcaggcacttcattcaccccacagaaacttctgacgcagataattggcatgttcatgtgtgatcgcgccatcgttgatctccgcgatgttgatgcttccgtacagctctccccacagacagtccagcagagaggacccctccgcaaggccttctttgtatgcgtccagatcatgctggaggtaaggtgggagcccatattcccatgagcgttcccgcatggcttccgccggctccccgcctgtccctattgagcagacctgcttttgtgccgacatatccttcataggaacacccctttctttgatttgtatgttgtattttaccacattgcctcgccgcaaatcaacgattgccctcatatcatatcttttcggtctgtttgtctacccattcctgaagtttgtccttgggtatcacaatgcgggtgccgatcctcagtgcgggaaaaccctcggaccgtgccaactcataagccccggcacgggagattcccagcgccgctcccatctcaggaaccgagagcatcagcggcagatcttcgtaagatttgaatgttccttttttcactggatatcatttctcctctccagccgtaggagaggtttttatttgttatacttcgtcttgttgatttatttccccaccatctggtgaagggagtgctctataatcaatggactccgtaaagattgcggacaatcaccatcctttcatggtcatgccgcccatgctgacacgatccatctccggatcttcgtggtcatcaggccggtggcccagggggtattgcgcgtccggaagattctgttttgccgcctgttccagccaatgcctgactttctcagcgtccgggatgagcagcccgccgtcccgatacagcagtcccaggaagtatttggcatggatatcgccgtactctgccagctactccagatctcccaccgcctcgtcccgctgatcgagcggcagcttgcggtcttcgatcttggcccgtagccgcaggcactcgtaggagacctcccaattttccacccactcgtctcgatcttccaccttttcatcttcgaatgtcatcacacccaggcggatattctccgcctcttggatgatagcgttcttgatctgccgaaactttttctcctgggccagcttttttcgttctctgggcttatcgtggcagtagttctccacctcattttggaggatgcaccactggtcataacactcacggaccaccagcagttcctccagcttgtccaccgcctcgtccacagttttcttcacggactcgggaaggtatccgtaggactttttgcccttgaccgtttccaactgtccgaccagctgctccatcttctgctcaatctcaggagccgcgcagagactttgcgccatctcctgcgtaagctgccggatcatgcggcgggctccccgcaccagctcgtcccgggactgcgacttttgttcgtaggtgtggagcatctcctgtttgaagatctgattggtgagcgcggatttgatattgcgggtaaccatcccacgtcaggtccgcttctcctggctgtgttgaccacgctatcatgtgcatatggggatgctttccctcgtcgcggaaggcggcataccagcggaagtggttcagctgaatgttcatggcggcggcgatgccattgcgattgacgcggagcaggttccgccatgctttggcattgtcgcagccaaggcgtgtggtgtcctcccggtgcggagagaggatgtacgtccagacgttgccggtgtagtgctccagttccgatatggcggtgtccaggtccacacgatccgcgtcaccgaacaggccatggtcacccagtcgttctgcacgaggacgtgttgcgatgtatttcatgtaaccatccgtctgctgcacctgcttccagtgttcctccagcgccagggtgatgagcgacgaggcattggcttttgtaggcttctgtacatagtcatcatactccagcagctctttcacatccgggaagtcttttgtcagctttgtgatgagctgctcctgcttgcgggttggcggacggtcatccgggatgatctccacccgctcccgtgtcgcgatgtagcgcatgtaaccgtctgcgccctggttacctccgcacttgatatacggacttttgacgatcagtcttgccattcatccccatcctcccaagtctcccgcacccgctgctccagcgagatgcagccattggtcttccgcacattttggacgctctccgtccgccgtcggcgcagctcctcgccgctgaactgatatgcgtcggcgaggataccagccaccagatcctgctccaccgcttgcttgtacagcagagaggacatccggccttcgagctggtccaacaggccgtccagataggacttgatggaggtagggagaaacaatccagcgttgttggcgctgaggtagtccagataaaagtccaccgcccgctcaatgaagtcggtgatgctccggctcctgtcctcctgataccggcgctccagaatggtcttttctccggtgacaggtagaggggaaacttctctttttttcccataatggtcttctttctgggtgtgacccctgttttttctttgtgggagtatgcgttgggggataacgaccgcagagatgatatcacggcccggatattgactccatttttgaagccacagaaactcccgtaattgcccgcgctacgggcagaaatgaccgaacagagcggcgcttgtgacgcctgttctttatccagcattttctttcgtcctccgcagagcctcgaaaccggcccaaattcgtccaaaatccccgggaggggctgggaccctgctgagtcccaagccactccacacagggcctcacagggggctcacagggagtcttctgcctgctgctctgccagcatcttctgcacccgctgccgctctgtctgggcctcaagcgtactccgctgccgggcgtagtagtcccgcaatacctcctggatagacggcagggtgtatttgagatttccgtttcggcgccgtccgcttttcagccgcacgtctgtgggctcggtgacgatcaggccgcgctcttccagggccagtacgtactttcgcaccgtgttttcactcatgcccaccgcgctgccgatggtccggtagctgggccagcactggtgtgtcctgcgatcctcgcagcggcgcaggtaactgtataccgccagctccccagcgctgagtcccagctggaacacttcgttgggcatcgtgaagtagttgttctgtgttctcatccgccacctcctgtgtgtgactccacccaccggatgaacgcgtcttttggcaccaccatacggttgcctacccgcagcaccgggaagccgtcctcatgcaggagttcgtatccggatgacggagacacgcccagcaccttcgccaccatctccgcgttgaggaacagcggcaggtcgtcatagcttttgtactccgacagcttcatgcttgtgcacctcctttactcgttttgtgttctgcctgaacgaaggagctgcaggaactcatccacagagtggaccatccccgcttccttcatgttctggtagcgcaccatgtcgcaaatcatgtggaagtttacctccgcgtcttccagcagcttgtccatggcaaggacctgctggcccactgtgagggttgtttttttgccggggtctttcagatacgcccgcacggcatcttcctccggcatcttctctcccagcacagctctcatctcatggatcacacagtccagcgtttctttctcacattgcatcttcagaagcattttcaaaaacctgcggttgaatttggttccatccataatcctgtacctcttccttcaattgtcattcatggctgcggccttcagccatatctccgatgtgtggaagcgtcgtttggggcacgatggttttctcagatccatcagagacatgagcgcaggagaaaaaatcccctcataaggggtagggataaaatcacggttttttacaacctatttttgcgagattttcaatttgtttacaatgtgtgtctcacgtcaactcgctgcgttctcacaacgcggaaaccattgcccctcacttactaggacactcaaagggcatttgtaaaccggaaaacaaaaaaagttgaagggctctgtcagatgacagagcccttcagcttttggtggagctttctcagccgctttgataccgccattttggacacgccgtagaactttccgatctcctccatggtcagacccctgtcatagcggaaatcgatgaactcgcggctctggtgatccagaacctccatggctttttgcagactttcaaggcggagggtccagagtacaggatcctccacgggacgcctgacgcattccgagccgggcagcaccgtttcaaactcacttttactcagatgcctttcgtcctgcttttcctgcgcctgttcccgtttccgatcctgctccaggaagtctgcgacctcctttggcactgatacttgctgcccactataaggaatcacgacaaagtcgttcatttgtgtcctttccgctttcgacggaaagtcacacacccgcgctgccggcacagcgccaaaaactgaagaccttcatggaagtttccttcgtacagggatggtgatggtgccctacgaggcccatgaacgtctgaggtcccaccggggtgtggacctcaccggaaagctacgagtttaggcttgcgcctggtttgattatatcatgctggaattttttgtcggtcgaaccgtgtcgaatgggagaggtttttgtgatcttcagaaagagaaaagcccggagctggtgatatgggccagttccggacttctgtactgtttactgcggcgcaagctttgaaatgtcaaagtacttatttcagccaaaactaatttcatcttcccacttcagcaaacgcactactatgtaatgcaaactgtaaatgctgaatcaggttcattatatccgtggggtccaggaaacaaacagtggcctttgaatggtacgcctctccgtgccgcgtggtggaggcagcagtcaatcctactgcaccataattgcaactttcattacatccgtatttggttcatgaagatagtcaaaagcttgctgaaggcctgacagaggaaagcgggccccaataaagccctccagatgcagctttccccgttgcatgaggtcaaatacttgtaggtagtgccgtcggacatattgcatgacgctgataatatcgatttctcctcgttgcaggtgtgtcatattcatcagaatatcccgcccatatgtgcctaccaaaacaatgcgagaagcattttgtgcgcaacacaccatgttttgcagcatttctgggattccgcagcagtcaatcaatacatctgctcctgcagaaccaaatgccccatcgatggcttgcgcaagagaaacccgattggtgttgcagcagttttttatgccgcagtcctgtgcgtattgaagccgtccgtctttaatgtctgtaattaaaacgttagcgcctctagccacagctatttgtgctgtgcagttgccgatggtacctgcgcccacgattacaatatttttcccctgttcagctccggcccgttccgctgcattagctcctacggcaaagggttctaccagcatacccatgtcatgggttactccctgcggcagcttcacgatgttaaattggttacatttataatattccgtgaaaaaaccgtcttcgttaatacccataaatttcttgtgggtgcagacgttgattctgccgtgccggcacggatagcaggtaccgcagatcaactgaggctgtactgtaacgagatcgccggggagaaatttcttttccgcctcgtagccaactgcgacaacttcacctacacactcgtgccccaggactcggggatattgcacggttttatgccctccacggaatgccaacatatcagagccgcagataccagtttgcaaaatcttaaataaaacgtcctgtggcccctgaatttgaggcattccccgcttctcaacggtaatctcatacggtgctgttagaacagctgctttcatgtcaaatatgctcctttcaaattgaatgtcagatgaaaggaaggaccggcccgccggaaagacgggccggcctgttgccttattcctgcgcggaggtattgcctgctaacgcaacagcttttttctacgggactttcggaagaaggcctgtcccgctaagacaataacagccgcaacaatgagacccagcgcaatggggtgctgtgtgaaagccaacaagtttccctggtcggcgatcatggctgtccgcaagtaggtttccagaagtggccccaacaggtatcccagcagaattgcaatcagatccagtttgaaatagttcaacagaaaataggcaacgattccagaaactaccattaccaacacttcaaaaatgcggttgttgatggcgtagacgcccaaaacacagcagaccaaaatagcaggaaaaagaagggacttgggaatccggatcatttgaacaaaaatgttcatcaggccggtttccatcagatacattacaatatttgccagaaaatacaccagcataatgcatccaatcacctccggggcgtccaccgccagcatgggtccaggctgcagaccgtggatcataagaccgccaatcagagcagctgtcacgttgtcgcctgggatccccaggcagcacaaggggatcagggctccgccgttgacagcgttattggagctctcagatgctgcgataccggcagcatatccggttccgaatttttccgggtgcttggacatggttttggtttggttataggccagcactgtggcagtatcctgacccacggccggtaaaataccggtgaaggtacctaacagagagccgatggtgatgcctttccacatttcatcccgctcatcctttggggggataaaggggacacgccgcacccgggttgttatccgcagtccggacaattcaccggattggctgagaacctcactgatggcaaacagccccatcagaaaagcggtcaggccaatgccggaactgagctgccactggccaaacatcaaccggtttacgccggtgacctggtcaattcccacagagccgatagccatgccgaaaaacaatccgattccgcctttggctccgctagaactgaccatggagagcactacgcagatactgaaaaaaatcagtgcaaaatactcccaatgcccgaactttaatgtgaccttggatagctgcggcgctatggtcgccaggacaatagcagaaaatgtgccaccaatcaaggaggcaaacacaccaagagacagtgcagcctccggcttgccacgcttgaccatgggatagccgtcccaggtggtgacaagagatgctgaggtcccgggaattttcagcaggcacgcagagattaggccgccgctgatgccgccaacataaatgccgataagagtggaaaggccttccgcagcagacatggcgtaggtaaaaggaatcatcaacgtaacgcctaaaacagccgtcaagccagggatgcatccaaagatgatacccatcaggatgcctccagtcatatagacaaacgacattgggttcgccatgaggtaagcccagccctctgcaaatagctgcattcacgacacctcctatatttcaagcagcgagagcgatttgacgttgctttgcgcgggtgagaagcgagtcacttgaggtactcctcataaatcggagcaaagatgttgtaccactcttcaattttcgcccccatctcatcggccgggataaagccaggcaggaagccaaagccttccagagcctccagataatcggggtcatcttgaaggtctgccatcttatcgttcagatactgaatctgctcgggagtggtatccttggtggcgaagaaggcacgatactgggcgccggtggcttcaattcccagttcctctgtgcagggaatatcgggataaatttcacagcgcttttcgtccacaatcagcaggggtttcacattgccggattccacggcggagcccagatcgcccacctgcatgaaactgacatcaacatggttgcccatgatggcagtaatggcgtcagcaccgctgtcgtagggaacctgggtggcaccttccaggccgagcccctggagcagttggatggtgaccatctgctgacgggcaccgatgaatccccaagtcagttcagcgggatccattgcttttagatcctccacactgttgatcccgctgttgggattggtaaccacgatgccgggatcgattaccatgcagggaagcggctccatcttctcccagagtttttcctcactgacaccggtcagatagtagcaaatcaggtccaggggactctgagacataatgtgatagccgtcgccgggctgtgtggaaaattcttgtgaaccggtataaccgccggcaccggtcataacggagcaggcgatggacacaggtagatcaatgttggccgccacagcacgggcgatgttgtcggtgccgccgccagcggcgtaggggaccagacacgagatgtcttccgccgggtaagcggcttcttcaccgccaccgcagcccgacagaatgccgatcatcataagaaatacgcaggccagtgccaagatatttttctttttcatataattttcctcctaagcaaaataacgaaatgtaggaaagaacggactcagaagaacttgacatgcaggatctgtgtaaatacgaggaccagaacggttacgacaacaagagaatagacaaaccggataagatagaacttttttttgctggtacgttcatgctcctcccgctgcgattcttcacaaagaccatacacaacgctcagacagaaagtgagcaggaaagaagcaatgggaaaaccgattagttcataggcgggaacgaaaaggagcagcgcaatcagagtaatgatcgtttcctttttcaacctgaatttgccagagtcccgctcacccttcagactgattgatttgagaaacagagggatgctgaataccatcagcagaataccgatgccttgaataaaggtgcggggttccgccagaaagggaagtccgacaaacagcatgacaccactaacagttgattctgatgcgaacaggaacaatccaattgcaaaagagagaatgcttaaaatgaaatcgttgcgcttacgaatggccatttacccacctccttaacttgccaaatgacctccgtccaccgggagcgtcacaccactaatgtagtcggaagcagatgaggccagaaatacgacagtacccatcagatcctcgggatgcccccatcttcccatagggatccgcttagtgagctgtttgccctgttccatctgctgcagatccttgctcatttcggtgtccatgtagccgggagcaatggcgttgacattgatgccgcgaccgctccactcagaggagagcgccatggtcaattgtttgacgccgcccttgctggagacatacgccggcatgttccgcaggccgatgaaagaattggtggaggcgatgttgataatttttcccttgccctgtttcagcatcaccttgccagccagctggctcataaagaaaacgcccttgatgttgacccccataatgcgatcccaagcgtcctcggggaactcctcggaggggcagcgatactgaagtccggcaccgttgaccagaatatccagccgtccacccagagctgaaatcgcttgctgaaacccgttgctgagatcgttgaggtccaatagatttgctaccacggcgtggtatccagatttggcgccacccaattctgccaccgtgttttcaacctgtgaatttgcgtccagaatgacaatctctgcaccggcgtcatgaagtgcgacagccataccataacacaggccggtcttttttgcgccacctgtaacaatggcttttttccctgccagggaaaaagcattcatgtcaaagcccatatgcgccctcctttacatttcaaatgtgatcgtatttacaagatcctctgcagacaggccacagagttttgccagctgtgtataggttccggagtgcagatgccgtgcttttcgctctctggtgcgggtgctgagggtggtaatcttttccggcgaccaagcgattcctcgccggtacatttcgtccagataagaggcaaacaggaaaccgttattctgttcggcaaataggattcgtttgccttgttgggtcagctgcgcagccagatctgcatcaaaggaaggcatgtccaccacggcgatctcgcgtccctgttcccgtaacgccttctgggcgttgagtccctcataaatgcctcggccactagtgatgatgacggtgtccgcatgaggatctccgtggacatagccctttccgtattcaaattgcagggattcagggtaaatggtttcagaagcggctcgtgtgagccgaagtagcaccagccccttgctacccttggcaatccatttcatgaccgccaccatcattcggggacaggctacatcgattacccgcaagtgaggcagctgcataagcgcggtaacatcgtcgatgctcatatgggtggcgccgttaacaccggtgtcaatgttgctagcggtagagaacaatgtaatatccagctgatggccctcggacagccagccgtcacttttggaaattgattccattcgctcttgctgactgaccgtaatccggcgcaaaactcgccagtcaaaaaagacgccaaaagtggagtgccagacgttatagccttttgcggcaaaggcctcggcgatgccactcatgttggattcagcaatgcctacattgatgccgcggtttccagcatgtttcagcataccgggctgaagaccagagatcaggcccatatccgcgtccaaagtaatcattttcgggtctctggaaaaggctgctaccatatccgcggcaattttgctgcactgcagcttatctccgattttgggatcgggtaggtcgcgctcctggtaatgcagagtcttgtctcggggagcagcccgtttggtgcggcgttgagaatagcggcgtataacacccacagggccattttcatcctgctgtacatcaatccccatcttggaagcccagtgcaggagttgctcatattcctccggcgcacgcacctttgcagcctgtagaaaatgacacaagtttttaatgcgggtttccctgcggagcgtctgctgatggatttcccattccgccagatcctgccccacggtggtcttgtggctctcggtggctttggagaaaccaccttcacccttgcggcattcagagatgatggccatggggcggctgtcgatccgatgttggaagtgctccaacgcatggtaaatcggctcgtactcctgaccgttgacatccaaaacatcaaaaccaaagctctccaatttttctcgcaagctacccatggaaagcatgagacggtgagagtcatcgttttgtccatagttgtgatcgatgagaatgcacagattgttcagatttttggcagaggcaaacatgaatgcctcccatggaatgccctcctgcagttccccgtctcccatcaggcagaatgtccgcccaacaccctctattttctgcgccatggcaaagccgacagcggcactgatgccctgccctaaaggtcccgtcgcgatatgtactcctggcaggatagggccaggatgtccattcagatcgctgtcacttccgcgggaattctccaaaagcgctctgtcaaagaaaccaaaatccgaaaagaccgatgccataccggctataccgtgtcccttgctctgtacgtagatgtcactttcacgagcagtggggtcttccacatttacatgaatgaaacctccgtaaaaaagcgcgatcagtggaatcagttctgagaaggtgccaccgatgtggattccctggtctacagcgtggtttccctgatataccgtatccaaacgaaggtccgaatccttgacttccagcagcgcatatagcgccttttgggcgatcgggtgtttcattttcagataatcacagctcaagtccatcttggccctcctccatttttttaaatggtattgtattcgagtgagcaaaatgcacaaaaatgatgctgtgcagattgctttataccgtaattttacagagagaaatagcattcatcaaggtatgtgttgcaaaataatgctatattttgtagcaatattaactcaaataagattttacttgccacaaaacctgctatatgctacaatttgaatcgaataaaaatggagggaggaggcccatgaaacgattccgtatattaatcattgccccatatttgtccttccaagagactgccgcgcccgtcatccaagagtttcctacggtggattttgagatgcataccggagatgagtttacggcaatctctatttttaactcctatccacctaacgcctttgacgcaatcattactcgtggtgcaattgcggcgattcttcggcagtttacctctgtgccggtggtggaagtggatgtatccttattggatatcctgcgggctattaaccaaccgggattcagcgatcagcgtgtggcggtggtcggatattccagcattattaattccgtcaaaaaagtatttgaagtgcttcaactgaaaaacacggagatttacgaggtgcgctacgcagaagttaaggaacgggtggcggaactggctgaccggggattttctttgattattggggatgtgccttccgtaaatgctgctatggcaaacggacttcggggactcctaattctgtcatcagaggattgtatccgccagtccgttattgcagccatctattattcggagttgatggaaaaggggcaggagatcactcagatttttcagacagttattgataatttaaaattccggattatcctgatggaccagataggcaacgtaattgttgacaatcgcgcgtttgagattaccgatcatcaaacctttaaaaaagagttgttgctatttattccggtgcttttgcagcagtccaccgataggggctgtaaaaaaatcggaacacagggaatcgaaattatcggcaaaagggtttcttatcgcaatcaggactgcttcctgttcttcatttcactgatgcataagggatatgcctcccaggcagacattaccatcgaaaaaccgctttcagtgacactgtccccggaatttatcaatactcttcaaaagaataacccacgggtacaagcggtggcggagattgtcaccgcatccgtgtctccgccgcctgtgttgattttgggagaatatggtaccggaaaaagcagtctggcctattatttgcatggcctgcgcaaggagccaatggctccgttcatctttgtgcgctgcaacctactgaccaggaaacgctggaatgcatttttggataaaactgcatcacctttgaatgaaaacggatgcacattatatctggagaacattcacttacttccaatagaactgcagcaggagttgagcgcctacatagttgattctgctgcggatcagcggcactttattatcgcttcggcaacgaataggatccaccatcttctgtccaatgaccagttcttgtatccgttgtaccagaagatttcgtctctccatgtaatcctggcacctctacgggaatttcctgattccattacggacttctcacagatttttttaactgcggcaaatcaagaatatcaaaagagtatccggggatttgaagaaggggtcgtggctctgctggaacagcagcattggaataccaatttatcccagttaaaaacgtttattcagcaattagtgttgaccgcacagggagcacagattactctgaaagaggcacagaccctgcttttaaatgacaatactattcccccggaggagacggaatacttgaattacagtggaattgatatcacaaaaccgctggaggaaattgagcgggatattattcagcatgtactgatggaggaaaacatgaaccagtccgctgcggcaaggcggctgggaattagcagaaatacgatttggcgtaagctccatgcttaaatacgggcgtgcagctgccggcttaaagtcgctggcgacaccattactaaaggaaaattgcggattggaatgacaaccagctctggataggctgcattgccaataattttaccggcagtaaagccgcgtcatttttgcaaagccggactacaggctttttgttggatggtactggaaacggaaaagtagcgctggaactgaccagcagctggtgtacggtgttgtatccgtcatagctggtcaatgggcgcactatggaaacggggtacaggctgcagaaaattttgacatttaccgctgctgactggtggttccggactactggtatatcttagatgcctcatcagaaaaggtgcgaaaagcaagctgaatctgaaagaactggcggctaatgagactttacctcacctaattctctctggaagctattccgccatggtacaaaggtaagtgtaggcttacctggaaagcagagtaagtgccgttcgtattgatcccgaacaactgctgtctggtgaacagacggaaaccgtactgcaagaagctataaaatctgcaaacaggaggcattccgctgtaaatcctgttgaattaagtgactgccagcgatctggcgcggaacgtatatccaagggttaataagccgtatggaagtttatggtagacattgcagtagttggcggcaaaaatcaggcgtggcaagatatcgctcctggcgtgctggaactgtagcccatcgaacagctggaactaggccttgtattgaaatctgggaatttcagatatgaacagcttttcctgacagtcttgcgtaccgcgtgggttagatataggctttataacaatcccgagcaaagataaaagcccactccagttggtttactcacctcctatacactttactgcggtacaaattttgagtattggagcccagggagatgcgaacaagaagttggacctaaatggggagtttcaaggtgcgcctgtatgtggcagatctcatcgcccccaaggatagcttgattctgccatcgttataccatattcatgcagggatctacactgctaatgaactagaaaacagatgtgctttcctagaaactcccgtaaaacagctcgttcttcaaccgtccttcctacgcagactgcattgtcggggaagtgacctcctttgagacatggagcaagtgagttcagcctgctccaagctttgaatttagccctaccagcggtaacgcccttcccagtctaaactggcgatcggatactcgccgcttctcagccagcggggataaggaactcctaatgtcaataacccatttgacgatgagcaagcccgcatgaaaatcccgccaaagggtattttccacggctgagcagatctcacccatatagaaatgatacctccgctttttcttccggactaaactgtaccattgcttttcctttcttcgtaagaatacatctcttccgcctttttccagtccatctttttgtccgcttgcccctggggattgggatgttcttttttcactaataagtaatcggaactttagccgacataacagagtcagaccacagcttgtaccacaggagtttgtggaacaagcggattttgcacagtaaatcacgcccgggaaacaattgaaatggagcagaaatgattaaaaaccgccggaaacaatcaaaaaagtttcataaagctgttcacacgcaggaggttactggttcgagtccagtagtctccgtcgaaaagttcctgatttatgtaaaatcagggacttttcttttattcgtctcaaaaaacatgcttaaacttttagcttcttctccgaccaatacggcgatagtatctgatagagctggacagtgtcgggcaggaaatccctgcccggtgctgccgtaatggttacagtctttttgtatggccagaaaaaatccggccttccatctcacacgcgtctgcaagctctttggcgagctttttgatcggaaagtctggtgcggtttgtataatgagtaccaaatgtccccaatccacatgcaggtttagaagagcgctcttctccggagtcgaaccttcatcaaaatgaagaggaaactcttttttcagaatagaacaattcagatagacatccgcccggggaatctctggttggatacactgatagagcgatgtatacaatcctttgggcagccggcagccggtcaaagagaaatatatgcctttcccctttgcccacctcctcttctttgaaccaacggcactgttccaacgccatttggcgcagttctggaaagcgcgcctcccacagggcacaggtatgtccggtatagtccgacacggtcagcgccacaggtagcccggcactgacctcttccacagtggctgtacaatcgtatggaaggggcgcagtgcttcctcctgttcggccgaggccgccagcgccccatatcctccgggtagtccgtatgatcccatcataccggcagttgcttcctctgcccggaacgctccgggcatcagccaaaactcccctaggtgcagttcgttaagcaacctgtcagttctttcttttcgttttcggaaaaccatagttactctcccacatctgtgatatcaattacccattttctcaaagaggaacctgcaacaccaaggagcaatccgccggcaatcccgcccacagcagtgccaagtcccggcaaaattgccgtaccgattgcagcacctgccagagcgccgcctttggcgccgagtgcacctcctgcccaactgccgccaatacttgcagctgtactataagtctttttgccaattttctgatgggcgtcatgcagatctccgtcaatgacatcacatagccccaaagcatccagtgctgcacccgcgaccaacagcactctccctgcgatcctgactactttggaaatctcggtatgatccagtccggatggaagccttttctgccacgccgaagcatttgtgagaggatccacattgataaggtaatagcttgtattccctctatgggagtgcaaatcggcaccgaaaagcggcatattacttccaaagaatacaaaatatggaaaatcccgtccattccgtgcgatttttgttgcagccagaatcctcgtccaactgctttggagcgggtcaagccatgccagagttggaaaggtgcctcgcgctaattcagccagaaagctctcacgagcaccgtcagtcttttttccgcaaactccgtcctccagcagccgctcgcctaaattcaattcgtcgagttcttgctgcattgccacccacaaaccatgccagccgctcgatcatgctgtcagaaatgcctgtgctgatcccgcagtgttccagttcgctaacagcggcatgcaggttgcgggctgtatcgtctgtgatatagttgttctctcgttcgttttgcgataaatcccgctgtaattggcgcacgatatcttccaaggagccctttatgcctccatcgtagtcatcgctgcatatggcaggaagatcctgcaaagggactttccgttccgcatagttcagatattctctgctgccaatggaatacccacaacgcccccgcagatctgccgatttattgttgctgcggtatgtgttcagtacatcccgtaagaattctttatcctttccctgtgaaatatcctgcggaaatgcagtctttcttgcatccctcccgccgcaaaggaaatactccaatccacagccttttgaagtaaatcaagacactcactggtaaagaagtccgaaccgctcttaattttttgaattgctgtttggatagcccgatcatcacgaaaagaactgcctgggagataaaaagaggatagattcaggatttctatgcagtcactgctatggctgcaaaaactgcgggacatcctgcatacatcatattagtgattgtacctgcttggcaagtgcgctccttcgatcagaggatatattgcgaatgacgtttatgtgttcctgcaagtcgtcgtagatctcttccactgcggcgccggcacggttccccatctcccgtaatgtttcgtggtaattcgtttctgacggtctttgcatcagcgtgccaaaaaaagcggcgcggtttacgcggttccaatattcaccgctccccagaacagcgccgttttcaccagttgcctccttgctcataggtttccttcctgagagttttctcaaatacaggcttacgtatgaagaaaactgcatgtttattctaacctctttgagatcaaagagccctgcaaccaactgccgccccagatcgaatagggtctatatccaggtcgactggtataagagacaaaagatctctccgttttttggttagtcagccaaatcagagaaacaaaaggtaaaattattgacaaaagataaaatgaaatttattatttaactatcagctgtcagacagatgacgtcctatcgattagttattagggagaactttttaaggagggcaatatgaaaaaacttcgatggacttgggacaattttgaggaagttctgctgtgcatcatcattacggtcatcacgctagtatcaggattgcaggtagtttgccgttatttgttcaacaactccctgacctggagcgaagaagtgagcagatatttatttgtgtggacgggctttctcacactgagtctttccatcaagtgccgctccatcatctccattgacgctttcgtattgtggatgccgcggcgcgttcgggcgggattgaatatggtggtgtacctgttctgctccgtggtgtttgctatgctgtcggtcaacgcctggcacatggtgacgtcctccgccggacagaccagccctgctctgggattacccctggcgatcgtctatgcgggtcccctgttgggtctgactctctccattttccggtctttgggccggatcgtggcggaaaccaaaatcgtaatcggaaaggaggcgccctaaatgtctctggcgttgtttttcggagtattggtccttctgctggtactgacggtacccatctgtgtatctttcgcgtttgtgacgttgcttccctccattgtggacgccagtttcccctatacggcggacgctgcggtccgctccatggtgagtggtttaaacaacttccccctgcttgcgattcccctgtttatcatcgctggcgtgatcatggcgaaggggcagatttctgagcggctgttcaatgtgttctcgtattttgtcggcaacagaacagcgggtctcccctgcgcggtgaccattacatgcctgttctacggtgccatctccggttccggccccgctactaccgcggccgtgggttctatgtgcatccccctgctgaccagtgtgggctatgacctgacctttgccaccgcactggtggccgtgtccggcagtctgggcatcatcattcccccagtatcccctacatcatgtactgcaacgcctccggcgcctccatttccgagctgttcctggccggtttcctgcctggtgtgctgatcgccctgtgcctgatggtctattcttacatctactgtaagatccatggagaggataaggacaagctcaacgccaaatgcatggaactgcgggcaaaaggcctgggcacagtgctcaaagagggcttctgggcgctgatgtcccccgtcatcattctgggcggcatctacggcggcatctgctcccccacagaggcggctaccatctccatcttctactctctgatcgtcagcttgtttatctatcgcaccatcaagatccgggatcttccgaaaatcatgctggaaggcattcattcctatgcccctatcctcatcattctatccgcggccgtggcctttgcccgtgtaatcacgctgatgaatgtagccaccatcgtcagcgaggcggtgctcagtgccatctcctccaaggtggttatcctgctgctgatcaacgtactgttgctgtttgtgggcatgatcatggataccggtccggcaatcctggtgtttacccccgtgctgctgccggtggcggaggccatcggggtcgatcccatccacttcggcatcatcatgtgcgtgaacttggccatcggctttgtgaccccgcccatgggcgccaacctgtttgtggccagcaacctctcaaaagtatctgtgttcgatatcgccagaaaggcagttccctttatcctggcgttcctgatcgccttgctgctgatcactttcgtgccccagatcagcatgttcttgctgcagtaagagctccgggcagctgcccgttcatagttctaattatttttaaggaggatattcccatgaaaaagttattggctctgcttttatccctggcaatggcattgtctctggccgcctgcggcggcggagagactgcacagcaggagcctggcggggatgccgccggggaaacttacagcttctctgtaggcaccaacactgcggaggattccgtcaaccatttgctggcagccaagtttaaggagttgatcgaagatcgctctgatggtgctgtcaccgtgacactgtatgaaaacggcgccctgggcggcgacgcggagctgacggagtcctgcattgccggttccgtggacttcatcgtgggcatgaccggctctctggtgaactatatccctgaggccgccctgttcgacctgcccaacgtgttccccgacctggaaaccgcccgggaagtgctggacggccccattctggcggagctgcaggccgcctatgaagccggcggactgaagctgttcggctatgccgattccggtttccgcgtcatgaccagcagcaaggcggtccgccagatgtctgatttctccggcatcaagatccgtaccatggagaatcccaaccacatcgcctactggcaggctctgggcgccaaccccactcccgctgacttcagcgagttgtatatgtccctggagcaaggtactctggacgctcaggagaacccctatgacctgatcgtggccaacaagctgtatgagccccaggcctatgtcattgagaccaatcatctgctgcacactctgaacatggtgggcagcaaggccacctatgacgccctgcccgctgatatccagcagttggtcagtgagtgcgctgctgaggcccatcagtatgcccgtcaaatggccgacgagcgcatcgaaggacagaagtccaccattcaggatgccggcctggagatcatcactctggagcccgccatgattcaggagatggctgatgtctccgccaacgtctacgatctggtccgcgaacaaatcggcaccgatctggtggacagcctgctggcacaggtggaaactgcttccgttgcggaataagcaatatagagagggcagggggtgtgaaaagcccccctgcctctttcaaaatcattttggccccgaatgtttggctactgtcccacctgaccgatgagccggagccggtgatgagactggcggtgcggatcgcactgtttccggattggtcttctctggacagcagaaagagaatatgaggcagagtgttcagagagctgtgaatcgatttccttggtcctgtgcagaagactctggattttgggcgaaacccagccttgacaatgcttgtatttgttaggataattttgtaaaggattgtatgcattttccatacataccaaactttgacaaaaggtacggtggactttatggctctcaaacagattacgcgagtgaatattgcagagaaggtttttgaacagctgcgggaccagatcctccaggggacctggaaggaaggcgaaaagctgccctctgaacaggagttgactgaaacgttaggcgtcagtcggagctctgtccgccaggccatccgtacactggctgattatgggatggtagagacccgaaatggcaccggaacctatgtcaagcggcagatttccggcaattacatgctcaatatcgtgcctatcggcgatttgcagtttgaagatattgtggaagtgctggattttctatgcctcattgaggacagtgtggcagccatggctgtccagcgctgcacccaggaggagctggcggaactgcaagcgatccataagcgcctgattgccgccaaggatcaaaacgatctggaggcgctgaccaatgtggacgtggaatttcactcgaaaatcgcgatgatcacgcagaattccctggtggttcagacttacgcgcttttactggagtttctccagccggtcatgcatcgcacctatgtgaccctgggcgcggaggaaggtattccataccatgagcgactgatacaggccttttgtgcgcatgacgcggtatctgccaaaaatgtgatgggggcccacgcacaaaaccggagggataaatttttggcactccaagaaaggattgaaccatgaagattacaagcgtcgacattttcctcctgcgccatgtcggtgaggagttttcccccttcccttttcgtccggcggtgtgccgtgtcaatacggacgagggatctgcgggtatggtgaagccggcatttccgtaggaaccggtgaaaacggcgtggcctatatgctcaaggacctctctcagctggtcttggggaaggaccccatgaacaacgaggtcatctgggaggacatccataatgtgctccggggacacctcagcggaggcggtgtgacggtctactccgccatgagtgccttggacaccgccatgatggatatcaagggcaaaaagctgggggtccccatctatgttctgctgggcggcaagcatcgtgacaaactcaagtgttatctctcccagtgccatttgggttatctggatgattaccgcctacaggccactatacagcagctggccgatacctgcgccaagatccagaaggacgggtatcctgccgtcaaattcaatgccgtggcttttgacgagcaggcaaagcccctgccccgggagatgaccaccggtcccttggagaaaacgattttggatcttgcagaatcccgcctggcagcagtgcgggagcggtgcggtgaccagctgggcatcatcctggaaaatctctgcgggaccgatgtgaccgcggccgtgcagctggagcggatcgcccgcaagtacggcgtgctgatgatcgaagaggccacctctaacttcaatcccgccctttacggagagatcgcccggagagtcgagacaccgttggccactggtgagcgtttccacacccgctggggctttgaacagctgctcaaacagggagctatttctgtgattcagccggatatcaccaactgcggaggcctatccgaggccaagaagatctgcgacctggcacacatttatgatgtccgcgtccagtgccatgtagccggaactcctatcgcggaggccgctgccattcagctggaagccgccatccccaatttttacatccacgaaacctaccatatggcagcgcatcctgactgtgtgtcctacggaaagtacgcttacgtaccggaaaacggttatttgactgtgccggatctgcctggcctagggcaggagctttctgacaaggccatggcggaatcgctgggacatatcgaggtccgataaggtaaccaattttttgagatacagaccgtgccgagcatggcagcttcaaatccgctgcgatgggaacttgccccaagcatcggcccctaacaggaaaaacgcagatagaggcagtggagtagatcggatgataattaccctcgttaacagctaaaaacaacaaatagagcgaaaaggacaggacaacccgttctttccgcacctagtttatcttcgcatctatatggacttccatcgtaggcccggttgtcctttccaatttctcgtccgattttcgggttccccctcagaatcaaacatctaaaaaattcatcccatgcaacttcttcagcaaaaagcgaccaatatagccatacagttcaactgaaaagcgtacgattcacacgcagaagctcgctggttcgagtccagtagtctttgccaaaaagaacctgatttcacgagaaatcaggttcttttctttgctttttgcgtatttgcagtgccccgatttttttggtgtttttgattgactacagaaataccacagacaggaaaactcccgcatccgcgggagtttctttttcgctttcatggcggcaatcagaactctcagcttctcctcgcactcttccggggtatggccgcagacattccgggagctctgcttgccgtccggccctccgggtgaataccgcccttcccagaggtggtcgccgatctgattgccgctgccgggctttcgccgctttgccatggtatcagcccctttccgaagatctcggtcatgaaggtgtccatcacctgggccgcctgccgctgtatatcgtcggtgacgttggcgtaggtgtccaaggggaagctggccttggtgtggtccaggatgccggagcgggtcttggcatccacgccgatggccagagcaatcggctccgctttccaattaacaataaaaaatcggagtaccccgaaggatactccaatcgtccgcgtgtcatgaaacggcctgtgaaatccggtaataccggtggtttataagcagcagacaagacacttttatcttagatagtccggtcaagcacagtaacctgcgtgatcacatcgcgcaggcggtcagatcctaccatatagttcaggacatcgtcagctgttgcgaagtattgtgtagtatcaggctgcccccacaggtaggcaatgattcgtcccctggaatggctgatcccgtattctttcccatcccaaataaagtcgatttcaccgcctttgtccacacaccatttaaaatcactgattgaaacaaattgattctgttcgggtgtattagcgggaatcaaaggagtcatggaaacaatctcctttctttgtatgaatcgcttcaatggcatatccataggattaaagcttggacctgttggtgtccatataatttcatgggcgtggggatttacatgctcccccgggttaccatggtctgaatgatgaatctcataatcggctttaccatctgggccaatatgggtctcataaagctctccgtgtttattatatgtctgattgatatcgcccggattccctaagaacttccaatcgtttggttttttagggtttggtttccagtctgcgccataagcactgccgccgcctttgccaatcaggtacggctctattgtatcacgatcaccactcgatgtgctgccgattttaaaggcgtccaaatcttcaccacggaaactacgctcgtaatccacgtagatgatattgccctgcatttcaggaaacggtgtattgtaacagatgattttttccggctcaatgcgccgcagcatctcgtcatatcctgctatgaaccattctttctggtcacagcagttgtcatgctctgtggccatataagttgagacagcaacaacgcttcctttttcaatcccctcaaagcagaaatcaaacgtagattcgtctccccagttgacggcaggaatcacccggattcctttggatgcccaatatgcaccgcaccagcgattacgaaatacattgtaaatctgcatgacaggcgccatctccaggtacatactgaaatccggcgatagcaccgcacggtagcgggacagtttttcgacgtcattatctgggtgcttccaaacccgctcaaaacgatagtcatataggaagaagtgaaccatccggtcaagatgattctgatcctccaaatgggtcttgtcgaagcctatcaacaaaaggtcgtcaaagtctccgggcttttcttggaacatgggaatgatggggattttcaactttccgttgccgggaaactgattgcgaagcagcgcctgactggttcggtaattgtaattttcttcggtcataaataggcctcctgtgtgaagtaaggaataagtcctcctacatacaggctcccgattggaaaaagttatacagtttcgcgccgcaacatgagcaattttaaatcagcaataaaaagacggagtatcacgaaagaatctgtaattattcaaagcagaaacaattttcagaattcgcatctgagttttatgcagtgcagaaccttaccaccccttcatggtcatgccgccccgggaccgggtttgttcttcttcgtggttgtctggctgatggcccagagcgatccgcagcttctggagctcttgcatctgcttgcagtcgatgtgcagcctcggctgtgcagtcacggcagccgcattgtgctggaagatatagctcacgtgaaagtgcatagccgctgcgatgtcattgtggtgagcacggagcaaagcccgccatgcctgtgcgttgttatagccgagacgctccgcgcgaggctgcattgcgatgtacttcagatagccgtccgtttgctgcacctgtttccagtattcctccagtatcagggtgatgagtgacgacgcatgagcttttgttggcttctgcacatagtcctcatactccagcagctctttcacatccatgaagtctttcgtcggctttgtgataagctggtcctgcttgcgggtaggccgacggtcattcggaatgatctccgtcacaatatacctcttgtagctgatctgctttttgagcacctgcagctgaccgtcgatggctgactggatcgctggtgagagcagcacgctactatcgtctgatgtcaagtaggccgtgtagaagttcgccgccttttccacggacttgctcatgctgcagcagctggcatcgctctgccagcgctcgattttctcccgggtcttcggctgcagacgaagctggagccgttccttctctgttacggaatttcccctcctttccaataagatgtcatgaaaaacgtctgttttctaagggatttgtgcctctctgatgacagatttatgacaaattatatttgattttcattgcctttcggcagtgtgaggcggggaacaatctgattttcccgcgcaaaacatgcggcaaaccagtcccgtttcatgtgttcagcctagcccggggataatcatgaacccatttaggagcattttaaaagctgtctggatatccgggtccccggctccaaacagtcgggcagcttttggacggaaggccgaaacggtatcccgcaaaagatctatccctggtgcttttacaatcctctcactgtacacatggttttttgtgctgaggagcacctttctttgatcgatgcggcatagtttcagcctgacatgtgccgttccgctttcaggcggacacagaacagaaacgtcacaggcagaagtcacgaggcaggcggaataccgagccagtaccttcccgacacaacagcacacaacagagcgggaacgggtatgagcgcaggcccctttttcacgcacggggccgccggcctgcgtccgtcagtctccagcaatcctgcgctttctggatttcatagcgtgcaggagaaaagtgaagccagatggatgtatgagagactattggccttttatataaggttacccgaaaataaaaacaaaaaatttttattggagctttgccgtaccggtatcaaggatgcaatgcctcatataccagattccgttgtcagcgtgtcagccttttaaaaaagcacgcacattgtctacacccccatgccgcaggactttgagatatgtaccttttctcagcgcctgatataaaatagccacactaaaatagccacacccttaggtgtggctatttttatatgtcacagggacttccagacgttcagtgaaaatgtctgaccgtgcataagtgccgcctgctctgcagatgcagaaggtttttgtaaacatataacaaaaaagcacttacacatttacacaaaatgacgtttttgaaaaaaagccaaaaatcctcccctgtcatgtgaaaaacaggcgttccaaaaatgccgggtgttcgataaaataatcacaaagaggtatatgtgaggggggagaactgcatggagtatatcttggaaatgaaggatatcagcaaaaccttcccaggcgtcaaggcgctggaccatgtccagctgcaggtacggccgggagaggtccatgcgttgatgggagaaaacggagccggtaaatcgaccctgatgaaaatcctgatggggatttacaccagggatgccggtggtgagatcctgtttgatggcaagccctatatggtttccaaccccaaggaagccatggacatgggcgtggccatgatccaccaggagctcaatcccatcttggatatgaccgtatacgaaaacatcttcgtaggacgggaactgcgcaagaacggtctggtggacaaaaaggccgagattgaacaggctcagaagctgattgaggagtgcggactgcacgtctcgcccaaggagacgctgcggaacctgacagttgcccagtgccagctcatcgagatcatcaaggcgatctccgtcaacgccaaggttatcatcatggatgagcccactgccgccatcaccgaccgggaagtggagctgctgtttggacatatccgccgcctgaaggagaagggcgttgccatcatctacatctcccatcgtatggcggagatcttttccatctgcgaccgggtcagcgtctaccgggatggacagtacatcgggacaggcaccacaacggagctggacgaaggccagctcattaaaatgatggtgggacgggagatcacggatgtgtatccaaagctggaggcggacatcggcgaggtcgtctttgaggcaaaaaacatcgtccgggccgacaacaaggtcaagggcgtgagcctgtccgtccgccgcggtgaaattctgggaatcggcgggctggtgggcgctgggcgcagcgagctggtggaaggcatctttggcatgcacgccctttcacagggagagatttttgtccacggcaagcgggtgaagatctcctctccggaggacatcatcaaacagggtgttgcgcttatcaccgaggaccgaaaggtcacgggactgaatctcagcggcacggtcaacgacaacattgccatggtggccatcaaaaagctcctgacccacggactctacaacaagggaaaagcccgccgcgcgtctgaggagtatatcgaaaagctcaacatcaagactccttccgcagaccagatcgttggaaacctctccggcggcaatcagcagaaaatcgtcattgcaaagtggcttttgaacgatccggacatcatcattctggacgagcccacccgcggcatcgacgtgggtgccaagcgggatatctacctgctgctgggcaatctggtgcgccagggcaaggcggtcatcatgatctcttcggagatcccggaactgatgggtatttgtgatcggattatggtcatgtgcgagggcaactattccggagaggtcagccgggaggaattctcccaggagcggatcatgacgctggcctctgccatcaaggtgtaaagggaggaagaactatgaaagaaaagagtcgtgcaaaatcgctgatcagcgaatacttcatcttcgtgatttttattgcgctggtggtggtgctgacctgcctgaagcccagcttcatccagcctgccaacctggtcaatattctgaagcaggcctctatcaacggcattctggcattcggcatgatgttcgtcatcatcgcgggcggctttgatatgtcagtgggctcaacggtcgcgttcaccggcatcctggccgccatgctgggccagggacagtatccgatcttcgtgccgctgatcgtagccatgctgggcggcctggccgtgggcgttgtcaacggcgtgggcgttgccgtgggcaacctgcctccgttcatcatgacactgggaaccatgacggcggtccgtggtcttgccctcctgatctccgacggcaaacccatcatcggaatcagcgaatcgtacaaggctgtggcggcgtcttcgatcttcggcattcccatgctggcggtctttctggtgattaccattctgctctgctccttcgtgctgtcgaagacagtctacggccgccgggtatatgcctgcggcggaaatctgctggcagcgcaggtctccggcatcaacaccaccaagatccgcatctccacctttgccatcgcggggcttctggcaggcctgagcggctttttaatgacctcccgtgttaccattgcccagcccacagcggctgagagctatgagatggatgccatcacggcctgcgtggtgggcggcgtctctatgaccggcggcgtgggcaagccttggggcgtggtgattggctgtctgttgatcacggtcattgccaacggtctggacatcatgggcgtgtcttcccactggcagaagatcgtcaagggcgccatcatcgtactggctgtgctgatcgacgtgaagggcaagagcaagaaacgctgaacggtattgagagaggggcgttccccgtcctgctcttgatatatatcgaaatgaaccaaacatttcaaggaggaaagaacatgaaaaagaagaagtttctggctctgctgctgaccggcgccatggcgctggccgccctcaccggctgcagcagcggcaccgagaccaccgaggagagcactggtggggatgcgtccgccgagagcggagacggcgcctataagattgccctcatccagcagcaccagaccaacgcgttccagatcggcgtcaccgagggcgcacaggcgaaggccgatgagctgggtgtggagttgaacattctgagcgccgatcaggacgctgccaagcagatcagccagatcgagcagtgcgtgtccgagggctatgacgccatcctgttcgagcccgtggatcccgatggcctgcgcgacgccgctaaggccgctgccgacgccggcgtcatcatgataaacatcgtatccgcctgcaccgactgggagtccgccggcatctctgccgtgtcctgcggcgacaacgtcaaggccggcgagaatgagatgcagcatgtagcggatctgctgggcggcaagggcaacatcgccatcctgaccggcccctcctccaccaccgacacgaccgcacgcctggagggctatcgcaatattctggccaactatccggacatgacggaagtgattgctcccgcggactgcgcatgggacaccgccaaggcccagtccaccgtggagagctggctgtctgcctatgatctggacgccatcgtctgccagaacgacggcatggccgtgggcgcgggcaacgccgccggtgccaacagcggcatcgtcatcaccggcctggacggcacccccgacggctatgaggccatcaaggacggccgcatcaccggcaccgtggcgcaggacggcggtctgatggcttccagcggcgtggaagctgctgtcaccctgctggacggcggcacgctggagaacaatctcatcatcgcggacagcgtgtggattgactcctccaacgtggcggattacgagtaagctgccaaaagcgacaaattgatccgctgattctccaaaaattcttggcaaataccgagaaatagcgtataatgacagggaaagggaaaacgggttcgttttccctttccttatcagaatctgcgtgggaggtgctgcggatgctgcgggtcgttttggccgatgacgaaaacaaggtgatcctgctgatgcagaagctgatcgactgggaggcgcttggctacgagatcgcaggcaccgccaacgatggactgcgggcattggagctggtgcgggaaaagcagccgcatctgctgatcacggacgtccggatgcccggctgcgacggcatcgaactgatccagagggccaaggccctccagcccaagctgcatttcatcgtcatcagcggataccggaaatttgaatatgcccagaacgcgctgaaatacggcgtggaggactatctgctcaagcccctcaagcaggaggagctcaccggcattttgctgcgcctcaaggagaagatggggcaggaagccgcgctggaattccagctgaaaaggagcggagaacaccagcaggagctgctgctggacgccctgctgggaacggcggagcgtggcacctcctttttgagcgccgggcaggccaacggggagtatggatttcactttgggagcggcacttacgccgccgcagtgatccgggtggatgtgcccgatgcggaatcctatcaggacggctaccggatcctgctgcgccatgcgctggaaatcgtgcggcgggagagcggcctgctgacggaggagttcgcggcctcgctgggccatgccgggatcgcagtgttgctgtacctgcgggcctatcatgcggtggaagtgacgcagtgcttcaccaaaatccgcaaggagatcgaaaatcagcgggacttgttctggaatgtccaggccaccgtctgcctgggcagccggagggactctctggagcaggtgggggaatccatgcgggaggcgctctggctgtgcagggatcggctgtgccggccgcagtcctggcgggatgccgcgctggagatgccggatctggcccggcggtatcagatggacgcgtcccggaaaaagagctttcaggtggcggccgagtgcctggatgaggtgcgctttgtgcaggagctggaggagagctgccggacggtggaggcgctgccggacctgaacgggcagatggtggaggactggttccgccaggttctggaggcatgcctctacggaatgcgccaaagcggtgaaacggaagcgcccctggaggaggagatggataagcggttctggcactgcacggacatggcggcagtataccggctgctgcggcagggcatccaggcagagatccagcggctgaaggaggcgaaagccctgcgggagatgcggccgatcacagaggcaaagcactatatccagcagcactatcaggaggccctgcggctggaggatgtcagcaccgccgtgggcttcaacgccacctatttttccacactgttcaaaaaagagaccgggcagaacttcatggactatctgacggagctgcgcatcagcaaagctaaggagctgctgtgcggtgaggagctgtctgtgcaggatgtggcagagcaggtggggtaccgggatctcaaatacttttccagattgttcaaaaagcttaccggtgtgagcccgtcagattataagaaactttataagtaggtgataccatgtggccgtggacggactggaaactgcggcgggcgctgcggcgctaccggcgggagcgggacctggaggccgttttgcagatggactggcaccgggatttggatctgagcgcatttttcacagatgtggaagagcggcttcacggagaggagatcaccagactgcggcagaaacaggcggaatatctggcgctgcaaaaccagatcaacccccacttcctctataacgccctggaggccatccgcacagacgccctgctggcgaactgtccggatattgccgagaccacggaggctctggcgacctttttccgatacaccatctccaatgtccaggagtatgtgaccttttcagatgagctggacaatgcggaaaactactttaccatccagcgctgccgattcggtgacaaaatctctctggaactggagctggagaacgagcggcttttggaagtgcggatgccgaagctcatcctgcagcctctggtggagaacgcagtatcacatgggctggagggcaaactgggccacggcacggtccgcatcattgtggaaaacagcgaccggacatttttcctgcgggtgcgggacgacggcgtagggatgccggacgaacaggtggagcggctcaacgcgcagttcggcggagttgggggcgcggatatgacccagccgtgcggaggaatcgccctgcggaatgtcaacagccgcatccggctcatgttcggagaggactacggcctgcatttgttcagcgccgcgggcgttggcacggagtgctgcgtgacgttgccgctgcgtttccgggaggcgtagaaccgtgagagaggaattgatccgggtggagaacggctgcttccgcagggaggacgaattctaccgttttgaaatctccatttcccggggggagtgcatcggggtctatgtggacgaccattttacctccggcaccgcatatctggacctgttcaagggcggcacacacctggagcggggacgggccttttcctgcggccgtcgggtgggcccgctggaactggaacgctggatcctgcaaaacgccaggatcgtgaactggcaccggttccattcgcaggagctgacggtgcgggacttcctgctggcgctggaccgtccggccggctggccgcagagatggggcgcggtccggcgcctgcacagtccggagagccaggagatccggcagcggatggaactgcgtgtgccgctggagagccggcttgccgacctctccctgctggattattaccgcctctgtgtatttcgggtgtggttctggcggggagagttgctggtcctggaccggatcacagaaatcctgcggcggcgggatgtggaaaaactgatggagtgcgtacagctgctgctgcgccaagggacggcggtattcctgctggatctggacgagacattcatgtaccgctactgtgaccggatcgacgtcatccgggaccgcaggacctgctatcggctttacccggaggagtacggggagcagctctatgcagttctgggctggaagccccgggaccgcggagcggagcatacagagtgccgctgggaagacaagcaggtgctgcggctggagggtctcacttttccgggaatggcgccgctgacctgccagattcacagcggagagatcgcctacttccgggacgagaactacacggctgctgccagactccgggagtgctttctgggcggcaggaactggctgagtgggatgctgtggctgaacgggcaggcacagacacatgaagagatgacaaagcagatcggcacggagatcgggattcagaccgaacggccggaccgtcccggcggtgtattgtttgacaacctcaccgcgctggacaacctgacgacctgcctgcttcccaaggccggataccgtctggttcgccggcgggtcgcggagaatattttggaggaggcctccagatggtttccccgagaggatctgctgcggcctctgcgcacttggtccttaccggcgcgcctccggttctcctatttcaaatggtatctgctgaatccgcagctgctggtctgcttttttcccttttccgggcaggagacggcgcatcatgaactgattatcgacctgctggttgcctgcgcagaacgcgggatggcggtttgggtcatctcctccaacattgacgcgatctgcgaaaagacggaaaaccaggaatttctccagcgcctgcgaaccatcaactgacttccatggaaaaccggcggcagacttgtggcacaaagacctcctttttcctccatccagcattttttgctgcaggacgaaaggcatccgcagaattttgcatggcgcggcagttgcccgccggtgtcggcacatgcccgttggcggtgccccggcccgccatgcagcgctattcatgggttttatccccatttcagatacccgccgaaaagcgtttagctgccttgcggcaagccggacgcttttctttttccccaagcgggtgagaaatcgttcccagaaccaccttcccaaagaccagcagggcggattgcagctgccgtaatactgctcccagcacactgcgtacacctgccacccggaagctgcaggcgccgctctcatagatgggcgcccgcaccatctcccagggcggagtgacagaggaaaaggtctggttctccctggtggtggtcagtgtgtccggtcccatgggagcagatccacatttttatccctccgccagtgagatccggatacaataccgccacatgggatgtgggggcctgaagcccgcgtactttggcgcagtgccctcgttcttctggcgccggttgttggaccagttcaccgccacagcgccgccctgacggagcgtgatggtccgaccgctctgtgggatcaccaggaagggagcctgtcccacagcaaagttaaaccggagggcggtgctctctgcgtcgggaaggcgcgccacggtaaggccattcgcgttttccacattctggccaccgttgagagccaccagggcaatgccggcacggccgggaggagcagccctggcatacatcccacgtccgcgttctgtgccggttcagtgtgatggtgattgatggatatggagagctttgcttttcgctccggtctgctccacctccacatcggcccgcgctccctgtagtcgatgccggaaggcccctcgtccgtcagggcgttcaccatcagcggctggatgccgccggtgaaggagatgtcaccattgtcccaggggtcggccggattataaaagctgtcccgctgtttctctgcgatgtcccgctctgtaaagtaggcagcctggacatgggccaagtatttttcgatgtccaggaccagtttcagctcctccggagtgtagttcccccatccacggtgatcttcttatctgtaatgagattgccccggctgtccaccagtccatggaactccagcatgcggttgcgcatcaatcagcctccaccgcggcgtaggccgggggcagcagcgccagcgggaggagatggggaacggctggcctggctggcccctcaagtttacacgggccattccgccatcaattccattccgcagagcacggccgctgccgcgcagcgtcaatgtccggggtacttgccgctggcgcagatccgcctccggggcctcggccagctcctcccgctgcactggtttaaagagatattgaatggggtggcctgatagcccgccttcaaatatgcgttgctgcggtggtgataaaaaagactcccgccctctcgtcccaggaccgcagctcccaggcaaactccatgccgctcttgccagccatacagatgtccagacagaacaggttgaaccacgcccccttccgcatcgtggcttccagattctccgtgctggaaaagggcctcccctcgtgctccacgttccgtccccgcaggatatcctcctgtatggcgcagattcctccctgcatgggtgccgaaagagtccgcagcatacagcaggtcgatgcagaggagaaattgtgcccgtcaaatgggtcaaaaacagcgtcaaatttaccgccacgccagactaccccaacgccatttacatctgcaacaccagcgggcagacctacagtctggtgacgattctggaagtggacgaataaaagggaagccccccggaaatccggggggctccgctttgcttgagaaacttttgaagctatactgcttagtcagcctggctgagatttacagtatactccacagaagcgccactgccagcgttctcaaccgtgacagtaatcacgatgggagtaggcgtcagatcgctcacattacccagcttcggagtcagctgagcagctgccgcagctgcattagtacccttatcaatccgctcggcagatccatccgggaaagtaatcaggatggagttatcctccagcagatcttctgccagaacaaacaagccagtgccgcttacatcggtccaatcagatacggtattgttgagaacaatgttcagagtgtcgccgctccgagtgatggtcgcaccagtgggagtaccaggattataggcatccacaatgtccgcgatatcttcctcagtcatgtagttggaaacactcctcaccatgatggcctcggtcgcctcgatctcataggtgtcgttggcagccgcgcggaccagctcaccgttcacggtgtagtcgccagcggtggtgaaggtcagctccacaacctcaccgtcggcaatgtagtcgccgtcggaaacggtcttgccgttgacctcggcggacacatcggaggtgatcgtgccgtcaatatccagctcgtaggcggtgacaaactcacggtccttgttggtgttgctcacagtcaccttgccggtgctgggaacggtcagcagacctctgttgctgcctccaatgaagccatcgggattctcattgatgtcgaagtagttgccagcgggaatgttggtcagattggcggcatcacccttgtcgggatagctgacaacctcgccgtcaatgctgatggccacgacctcgatctgagtgaagttcacgcggtacatgtcgccgttctccagggtgacatagcccatgaacttgttcaggcgatccacgggagcgcccagcaggtcctcgatggcggccttgatctcgctgtcgctcatggacttctcatagtagcgcagctcgatccccttcgtagtcggattccaggaagcgggcaggaactcaccctcgggaaccgtgggattgctcacatcagagccagccttggctttgtcgttgatcacgatgctggtggccacgccgttatccaggatcgcgctcacctcgaccacgccggtgccgaaggtgccctgggcattcatgtcgcgcagagccttctccaggccgttgtagccggtgtaggagtcatccacatcatcaaactcgttgcccttcttgtcggccagggacagaaccaccttcacctcgggagacacggagaagcccttggtggcgttccggtcggtgtacagggtgccgttcttgaaggtcagcttctcaacagtgttggtgtcggacagcaggacggtgtcgaagtcctccacggcgtcctccacgtcctcgacctcgtcgacgaacttgtcagcagccttggagaagtcgatggcctcgaccttacggacattgccgtcagcgtcatacttgacctcgaaccactcgccctgagccatctcaccctggttcttggaggcgttgccgatccactccagggagtcgccgacctcggagatctccacgagctcgccgttgacgaccacctcgcgggtccaggtccactcggtctcatcgtcgtaagcctcgcggttcacgttgctgctggtgacatagacgtagttggaggaggtgccctcgttctcgccgatggtgacagcggcgatcacatagccgtcatcattgtaaagggtgtagatctcggcggcaggagcgatgtagttgccatccttcttgaggtcctccatcaccaggttgacgttcttcacgccggtggtgacggactccacgtcgtccacgatctggcgctgatcgccgccagtggtatcctcgacctcaacgttcttcagttccacgttcaggtagacggagtcgtcgttgccgtagacgtagctgctgttgttggcggccttcagggacacgtgcttcttatcgatggtagcgccattgctgcccacatcctgggcatactgggccacatcggtgtcatcgtcgatgacgttcttggaggtggacacggccacttccttcagggtgtacacgttgtcgttgttgaccgtgtaggtgcaccaggtgttcagctgagacaggttcttgccagtggtgtcgatgtcgctcttggtcatgttcacggtgacggtatccatgttgccgtccatgaagatgacgttggcgtcagcgttccgcacagacaggttgctgttcttgccgtcgatgccggtcaggaacacgtactggtcgggatcctcgttctgctcaatgccgatcatgtagccgtaggcgtccaggatcacattgtaggtgacgtccttcatattggcgtcgtcatactgatccagcacttcctcatcatacatgacggtgtcagcgtagtcatactgggtaccaccggcggtaacatacttctccaggcggaagttggagatgctggtgtcggacaggacctcgggagcgtccatggtctggatcacgccctgggcgatggtcaccaggaacaggtcgttctcagccacttcctcgatggcgaagtcctcgccgtccacagagatggtctgcttctggggcttatcctcgtcagcggtcttcatgtagacgggcttgcggctggtgccgttgttgtccacatagtagacatccaggtccacgtcgtcgttcttctcgtcgtagtcctcggcggccttggccagataggtgttgatgatggccacggtgatctcgtcgtcctgggtgtccaggaacacctgggtcagcacgccgttgccggtccggccgatggtctcgtcgttcttcttcaccatgtcggccttgccgaaggcggcatcacccagattctcatcctcgccgtccacatagacgaacagggtgttgtcatcaatggcggtcttgcccagcaggttgtacaggtcctcgccggtgaccttggtggtgtactcggccaccatcttgtcgaagtccacataggtgccgatctcggccttcttccaggtccaggtgtgggccggacggccgaagtcgtcggcggtgtccttcagagccaggtcgggctgatacttctcagcgaactcaaccgtccagccgttcttcacgttgtcggtggcgtcgttgatagaagtggcagcgtcgtggatgttgctggtcacgtaggtgggcttggaagcgccgatagcaacagtggcgccgttgacggtgacgtcggtgcccttgttttcatactccaccagggtggctttcagagcgttgacggcatacaggcaggcctcctcacgggtggcggcacgggtgccaacaaagttctcattgcccttagtcagaccggcctcgatggcgcgggaggccacattgacggtccagttggtgccggtgaagccctcgatggcgctgtcataacccagagcggtcagcagcattttcaggaaggcaaagccggtcagctgcgcagagggccggaaggtgccatcggcgtagccgtcgatcaggccggactccacgcagtaggcgatgtagccggcaaaggtggaacccacgggcacgtccttaaagggcgcggcctgggtgcccagggcctcagccgtggtcttgccaagcatcatgcaggcgatgatcttggcggcagcgccacgggtcagggttccctggggctggaaagcaccgccggcatagccgtcgatgattcccatttcggacatcacgttgacagcttccgcataggcttcgccgctgaggtcttcgctgtctgtgaagtccttggcaccggcgctgacagtgaccagagacatggtcatcaccagagcaagcaccagagaaaggaacttcttcattgggatttctcctccttttgaaatttgcggtggtccgccgcggcctccgggcccattcgatgcctccgccggcgctagccctgccggcgcattcgccgaagagtcgcatccgccccggcgtccccgctgaggcaactctatccaaacttctctaaaaagtccacagtttcagcccgtttttaatccaaacgaaaacttatggacgcaatacgttttgaatttgttatattttgtaaccttggcgcggagaataaaagaggcggcgaagcccttcgccgcccctcattgaatctgcttctgcccaggctgcttcgccagataataccgcttttcaaactgcagcagctggccgtccctcaccatccgccgcaggatacctgccgtcttgcgctttccgacgtgcaggagctccgctacatcctggcagtaggcaaaccccgcctcctgcagataggctgagatcacctcccactgcttttcctccggcaccactgttccggggagatagtatttcttgcccacctgctccagctcccgccggccaaccagccggcgaaggcggagatatgccgcagtgtccgacagattcagcagcgccatcacatcccgccgggtgatgctgccatgggcccgggtccactccagcagggtctggtcgtcctcccgctgtccgcctgccgcccggatgtcccggagcgtgatattttccagacctccccggatcagcgccgtctgcaccaccttggacagccgggccaaatccataggccgccgggactggggggagagcagcacatggggatcctccccaggggagcggaccttctgcactttttccagcagccgccgcacggcattggtcagcagcatgtcccgctccggcagatgcagcagcccccgctctaaatccacctggtcccaggtgagattcaccagctccttgccctgcacgcccatttgccagctcatccacagagcaatgcccgcggcggagctgtcctccttttgaaggacctgccacagacggaattcatcgaattgctgccctgcctgtgttgaacgctttttgtgcggggtgtctccggcaaagcaggcttggaaggtggagaccgacagaccgctgacccggacggcatagggccagtcgtgctgctccagctggcggaaaaagtagtcccgccgcagatctttcaattggagctgaggcaggcctcccgcagtcagggcatttctggcaatgcgggagacggactccggccgcagaggttcccggaacttatcggagatcaccacataaggagacaccgcgccgccattttcgaagcgggcagcgaggcatccggcagtctcttcctccagcgggaccgtccggtcctccagaaacagactcctctcctggaaatccacttgggcccatttcagggcgacgatctcctcccggctgagcccctgaagccaggccaggcggaggatgagccccggcaggtcctccggatgctggtgcaggagctggcgcatattctgttcatccggctggcggaactcgtttcgcataatgcctctcttggcgggcggcggcaaaaggttatccttatgtaacaaatcagaagaatgatttggatttccggataacgcaaacgctgccctctcccagccaatggctggaaaagggcagctaccttttatcatccttcaccgcttccgcaaaaactaagtatattacacttagaattataagcataacatttcgtttaagtcaagcattattatgcgtaaactgatgatattatattgaggagtatatcatcatgcagggaaagaagccgctgaacatcgcaatcggaagacggatccagcagtcccgggagcaagctgggctgacgcaggaggaactggcagagcggattgaccgttccacgcagttcatctccacaatcgagcgggggttggccggcccctctctggaaactgtgattcatctttgtgaagttcttggaacctccacagagtggatcctgcggggcagggccctccttccggactccaatctgctggcagcctccgttatggaaaagctctccgggctctcccctgcccagctgcttctggttgaccgaatgaccagcgatctaatcaaattgctgcaaatgaaggagagcggtgacgaatgagctcctctccctccaatatggaggaattgatagacgcatcgccttccccgcagcaccgctgcatgaagttcacaggccggctgcaaagtctatggccgttggcctgtcaagataagaccgggagccattctccggtgttatgccccccggagatcatcagtccggaagtatatcccatcggccagccgctctttacaaacgcttccttacacagaatgctgaaacatagaattccttagaacaagaaacgctcagatgggtgcatagaagcagctcctccagcttacagcgtgatccgtacagcaaaagccagcaccggacaggaaatatcttgcccggtgctggcttttgtgcttctttactatctctgcttgaggtgggtctgtcagaaccatgttgtctgtccgcagcagctctgcccggctttttcagggcctttcgcccgggtcttcaccagagtgctcttatcggatgcccgttcccatttctggtacatatctgatggtatgccatctctcacatcagccatctgctcatgtccgccattattcacgctccgccttgctatgcggctgaagagccgtgggatgctttgcctcagaatacgccctgctccatcatggcctcagccacccgcttgaagccggcgatgttggcgcctgccaccagggtgcgccggagtgtaaaccggcgccttttgatcttgtgcccactctggctggagtctgcaaaagtattcctgctctgatggcggcaatgcagccccccctttcaggacggcagttcttttctgcccagaaataatgaaacaggccgtcggctgcagccggcggcctgttttcagtttctccggttattgatacagcttcgggatccgaaagctctgctcgccatttgcctcatccgtcacggttccggccgggaagtaaatcaccggatttccctcctcgtccacctcgaacttcgtggtcccgccgatggtcacatagtcgctcaacggcgtgttgtcctcaatcgggaagtagcggacctccgggtccttgtccatgcggttggccatctgcatcgtgatcgtctccgtcaggtaattcacatagtcctctcccaggagctcctccagcgtgacgtcctcctgctgggcagacggttcttccgtctccggcgcagccgccgattcctgcggcggagtctccggatccgtcccctcactctccgcggcagacgcgccgcaggcagtgagaagcagcatacagagcagcagtgtgaggagcgtggaaatctgcatccgattctttttcatgatgaattcctccattccatattcatccgcagcacccgtccgggcgcctgttcccttttgataccgataccataagccctgtttccggcaaagcagccgcaaaaaggcatcattgttgcatcatttcccttctgcggcacgggaggccggttccttcccggagaggtcccacacaaatcccatcagctccacactgacgcgcccgctgcggccctccaccttccatctggggccgggccgtactgtcagatctccagcctgagacctctgcggaaggcctgtccaagcgcttccgccgtgcccagggaaccccttgccgagcggagtgtggagtcgatccacaccggcagccccgtgcccttgtccaccatcatccaatggtcatcccggtgctccgggccgccccgcaaatacagcataccggcggccagactgccgtcggcctggatatacaccacgccgcctccgcctaggccttgctatgctcctccgtctgttccagcagttgggtggcggaatagacgtccagctccggataccggatggtcctgcccagcagctccagcttttccggcagcgacgcctcccccgccgccagccgccttttgtcccctgcggaagagcaggtcagtaatttattcccacaatggccagtctgccatcgacaacactgaacaccacattgggcctgccgctggcggacagggcaaatcctgccttgctgggggccagccccccggggtccgccccggcgatctcagagaccagctcttctgagaagatccggtccgcttccagtgcgatcaggtcctcccgggactccacagattcccctccatcggaaaagccgatgtacagcggatacgacgccaggtccgccagcgcctccagattcttttccgccactgcggcctggatctgctctgcaaatgctgtaacagcctccgtatctatggaaaaattatctgtatactggggcgcttccgtatccgcaccgtcctcctcaggggtccggcccccatcttctccagcggtctcctccgcgggctgctccgcctgcggagagctgcccccctccggcgaggtactgccgctctggccgcagcctgcgagggacaggcacaggagccctgttaatgccaagaaaatgagcttcttctgcatcgtttatgatcctttcctcaagatgtttgccggcgtcatcctctgtgggactccggctgtcttataagacgccccaaagggcaaaaaagttttggcggccgcttttcctcttccacctccggaggatcacgcctccggaatgtcgccggcgcgaccgctggccacgaagagtcccgatgcgccatcggaggccgtcaaaaggccgtgggagaggcaaatgcctctcccacggcctttggggaatcaaattctgccagagtacgcgcttacttggtcacctcgccgccgggggcagagtgagccgtagaccaggcgtgctccagagccgcccagtcgcgctgttccagcttctccgtccacttctcgaccttgtcaccgctgacggtcacccaggtgtagtcgtggctgttggtcgcctcctgcatgtcggcatagaaccagtcctccggattgttgtcgggccaggtgatcatctcgtcctcgtccagcagccgatcctcatccgggctgcggcccagggcgcggttcacgatcacgcaggcctgtgcccgggtgatgttggtgttggggcggaaggtcccgtcattaaagccctcgatcaggcccacgcgggctgccgcctctacgtactcggtgtaccaggcgttaatatccacatcggtgaagtatccctggtagtcctcccgggtggtctcgaaaaagcccaccgcgatcttggcaaattgggcgcgggtgatcttggcatagggccggaaggtcccgtccgagaacccgtcgatgatgcccatgttggtcagggtggagatggcgttgttgcaccacaggtcggagctgcagtccgtgtagtcgttgacctggctccagtactcctcccgggtgtcgtccgtcagcaggcggaagaagatggtggccacttcgccccgggtgatggtgccgtagggctgcagcgtgccgtcggagtagccgatgatataggagtaatggtcctccgtgttcagggtgggccggctgccgcctccaccgccgcctccggtgctgccgccgcccccgctgctctccttctcgtacaccagcacgaagggagagaagctgccggcagtgaagaccagatggtcgccgtcgcgggtagcttggatcttttccacagtatgcgcggtaccagccaagtcgcctgtgtcgctggcgctctcacggtccatgccggtatagtgtaccaggtagaacgcgccgtcctcgtcggcgtcggcgggcatgggccagtagatggtcagcgcctgctggttgcccagggttaccacggtgttgccgttctgggtgtccaccaggtccagataggccatctcgtactggggggcggatagcgtgttgtccgtggccgcgacttttgcaagggcgtcagcgcccatggcggcgtcgaacgcgtcgctgttggagacgctgtccactagcagctgcacgcggccgggatccacctggacctcactgtcattgacataataggtcacattgccgttgtcaacggcagtgatctggttcgcgtccacagtgtcggcgctggtcacgatctcgttggtggaagtgccctcgtctgtgacgctcttgaccaagagatggccggtaccgatatcaacgctgcagacgagcgtatcaccgccggcggagaacaccgcctgaatctcgctctggttcagaccgccgtcgtagatggtcatctcatagttggcagaaacaacgccctcttccattcggatgttgtcggtagtgatgatgttgccgtcatctgtgaactggagccggaccttgacgccttcattttcaccctcgatttggttcgggctcaggctatatacatagcggctcacgttgccggttgcatctctcgagtagacgccctggtccatcagatcccagcggcggatcgccgcaccagtctcctggtcataatagtagaagctcaggtagtccgccaggtttgcagcctgcgtcaggtccacgccatggctggtgagccacgcttccacagagtcgggcagatcgatgtgataacccggctccggcaggccctgttccgtgctgccgacaaaatcgcccgcatcgtccagcacaccgctgtatccggttccgccggtgtagatcacaatgtccgccggcgtgatggtgatggcatagggcttcacctccacggggtccgccgggacctccaccggggatcctccggatgttccgtgtccgtgactaccacggtgttcacgatcttctggttcacatcgtccagtgaggtctgatagctggcgtacagcgttgcataggtccagccttcgacaataaccggattggtgaccgtattgccctcctcatctgtcagcgtcacaccttccaacttgtcagtcacatccagggtcaacgtctcatccgtcatgctggcaatggtgatggtccaagtgatgggatcgcccacggtgacagaggtctgatccggctctttgatcaccataaaacggccgtctccgggatcgggctcgggctcttcgggagtcgcctggaaatcccagcgcccgtacaaagtggtgtcggcatcgatggcagaaatcgttccgccgtaagggacaccgactttgtcataccagccgataaaataccaggtcccctgctcgtctgaaacctgcaattcactgggcggctgaatggtgtaattgctgccggcagccagtgtttccgtttcaggcagttccacgccctccgggtgatcgccggcccacgcataggtaaccgtgacctgggtcggcacgacccctgcggggtggaaggtcacaacaaagagatcccaatcctctaccgggtctccgatcttcggagcatcacagtcctcatagttgcaggtccagctgggatccccatagcctgtatcaggtgttgcctccaagatatcgccttcggccaggcgatacttgccatctgcattaacctccacgattgccgtgtaggtggtctgctcattgctgaacgtgccgttttccgcaaggaaaatcaccgagatggtattccccggctcctctccagctttctggaacttcgctgtgaaggtggtgtcctcgtcgtagggcaagcctgccagggacttcattcccgcgttcgtgtcagttctatgatagtagtcatcggtccactccacgaactcacagccctcttctgctgtcgccacagctcccgtcggagaggccatgccggtcgtctggtctctggtgacgacttctttctccaggcttacaaagcccatagcgtgatcggcactgacataggtgaagacaatctggtccttgtcgggggtcccgtcgggttcgtcgtcgggacccagctcgtcgatgtcatagtagacgtcgatggagttatggcctgcttggagagtctcaccgtctacaatctcgacatcgttcagttccgcccggtcaaagatgtatgtgctaccgttataagacgtacggtcagtgttatacagcccgctgaccggcgtgcctgccgtggacggcctatccttgggatcggtctctgtttcttcattcccatctcggtccacataatggtacacgacagtgtatgtgcactcgtcgggcgtcaccgtgccgtcggtggttgcggtgaagacaacgttgtgctcaggcatgtagaacaggccttcaataatgtcgctttcctgaaggtcatttgtagtccattcagtagcgtcttctgcctgcttcttgattacaacggtttccccgtaggtgtaggactctggttcagcgtagagagtcccgtccagataataggttacggtaaattcccgttctgtgcgcgtatactccgctctatacgtaatgtccccggttacagtatccgctatttcaggagaccatccggtaaactcatacgaataaagttcgctgggttctttagtcggatcctcaattctcggtgtcttatcgccgtaagccagcccgggaaatacggtctggggacttgttgttgtgccgccattcaagtcgtaagtcaccgtatagctgttgagctgagagaagctgccctcgatcacaacagcatgatcggtgaaaatgctactaataagagtaacaaagggtaaaccccttgttactcttattttttatgaaaaaacggaggtgaaaggaccatgagcaacaaatatttgggacccgcggatcggcagctgattgcagagaagtgggccgcttatgcgtcggtgcgggagatcgcggccctggtgggcgtggcgcctaaaacaatctatcaggaattgcgtcgcgggaacaatggcaccctggacaagaacagccgccagtcatacaaccccgatctggcccagcgtcgtttccaggaaagcctccgccggcgcggaaagcccctgaacagggcgcgggccgccagtgaatgagggaccccaccgccctgggggcgggtaaatgcaaaggaggaaaaagcaatggcaaccatgatcaaacagacgaaagaggaaatcagctgggcggagatcgccagggccagagagatgggtgtgctggacaagctgctggcggagcgggatgtgatccgtttcaacctgcggagcggcaccgaggtggccatcatggtggaaaaggtggaaccgggccgggtgtggatgggctttgtggacggcgtggcagagcgtcccatgtatgagagcctgctggtgcgcccggtgtcctggaaagagagcgacgcacggaagtggtgcaacaccgatctggtccaggatctcccggaggacctggtgtccatcattacaccccggaccattcggcagacggtagaggacaaggagctggtaaccacggatctgctgtggctgcatagcgcaacggagtttttcgggcgtcggacatgggcctctggcgacgatcccacggaggagcaactgccggtctacaagaccgagcgggaccgcgtgaagatgtggaacgggcggacatggccgcattacacccggtccgtctatgcgtcgtacagcaacagtttctgccgtgtctatacggacggcacggccaccaccgacaacgccgacggttcgagggccgtggcccccggcttttggatctaatcgaacaatccagaaaaatcaagccccgcaaggggcggagaaaggagccggacatggcaaaacgaaaggaaatcaagtggcggtgggaagcccgcggcaccatgatcggacggcagaacgggatcatttttcggatttatcacccgtgggacatgccggagcgggaacacaccgtaagctgctacgacacaaagggatccgcaagaacgatcagcacggcgggttacagaaaattcacctgggaggaggccgtggagttctgccaggcaatcgcagccggagagattgacctggaggacctgcgggcggagtttgccgcgatagaggcagaacgggaacggcaggcgctccgcaaagccgtggaagaggccaaggagttccggggccacctggaggcggcgggaatttcatacaacaccctgctggaactggaggcgctgcggggaaacctgggaagcctgggacacaacgcgctcctgggatttgaacgcggggagggctggccggatgggacctgacgggaaaggcaccgcccaggcagcggtctacatagacgggcagccggtgcaatacgccggagaaatcacgctaccggagatcaccgcagcgccggaacagatggagagcacggaggcaccgccgctccttgcgtcaatgggctttacggtggagcagttcaatgaagcggcccgctttatggcggaagcgttcggcattttctgcgacaagctggcggaggccaccagagcgatggtagacgcatgggaggcgatccgggcggcagaggagttccgcaaggccctgcggtgggcggaggcggccaacaggccgctggccgcccgctaccaccacaccaaaaagaagcggatccgcaagaagtacgcaaagcggatcctggcctggtatcgggaggagatcctgtaatgctgcgactgaaagccacaaaaaccagtttgtacaagctggtggcggaatttgtgccgaacctgcctcccatgcggagcgggaccagcttcaccaaatatccgagaaccccggactatgccctggactggatcacgcaggaatgggacacggcacatgcctttttctccacctgcatgggccgcccgctcctgtccattgagatcaggagcggagaaaccggaaagacggtgaaccgaaccacacacgccctgaacctccgggatctccgggagcggggcatggtggaggagttcatcacggcggcagagcgccggcgggtagaaaggagtgccgacaatggtggactttctcccgctacctgataaggaatacagcgtgatttatgcggatcccccgtggcagtatcggcagcacgggaccacggaaaagagccggggcacggcactgaaacagtacccaaccatggcaaccgaggatatatgcaatctgccggtgcggaaaatctgcggggggggggcagcctgttttctatgggcaactttcccgaacattgccgaggggatcaaggtcctggaggcatgggggtttcagtataagaccgcggcttttgtgtgggtgaaaaaatacgccaggagcgggaccaacttttggggcatgggagcctacacccgcgccaatgcagaggtgtgcctgctgggggtatcgcctgggtttaaggcaaaagagcggatccgcagccacaaggtacaccagatcattgaggcccctttcgaggggcacagcaaaaagccggatgaaacgcgacggcggatcgtggaactgctgggggatgtgccccgcctggaaatgttcgcccgccagagggcggagggctgggacgcctggggaaacgaggtgccgccggaagaaaggacgatcaaataaatgaccgagcgggaaagactgctggagaagctgggaaaggtcaaggccatggcggatcgcggcgagggcggggagaaagagagcgcggagcgcaccctggccgcccttatgaaaaggtacgggatcaccgaggaggacctggaggacacaaaggccaccattcactggatccgctacaaaacggactgggagcgcagactgctgggacagctggcttatatgcacctgggtacgggccattctttcgggtgcatgggtcaatacacgggaagatcccggaaaaaagtggggatcaagtgtacagcggcccaatacatcgagatcgaggcagattttgccttttataacgaggccatgaaagaggaaatggaactgttttacagcgcgtttctccagaaaaacaggcttttcccgccgccggagctggccgcggaaccaacagaggcggaaaaagaggaatgggaagatatggaacggatgtggaagatccactccatgatgaacgggatggaccggcacacgcgacacaaggccctggaggccgcagaataggagcagaccatggacaaaagacaggggcgcccggccaggctggagatcggaatggtggtggtgcggacgccgcagacaatattcgaggaggagcacggaaaggagatccggcggcccaggcaggggcaggtggactatatccacccattgggccggtttcacattgtggcctttcgtgttcgcgggaaaatcatcaaggaaacctttcagggtgtggaggtatcacaatgaattttttggaaatgaacggactgcaaacggcgcagacccatttcaaggacatttttcaaaacaatatccaccgggactatgcggacgccatgctggactggctggagcaggaaacagactttttcacggccccgtcctccacgaagtaccacggggcacaccccggcggcctgcttgtccatagccttaatgtgtactaccgcctgcggaatattgcgatccgcgatctggcggacaaggaggatccggggaaatgccgcctttcggaagaacaggaggaaacggtggcggtcattgccctgctgcatgatgtgtgcaaggtgggctgctatcacatggaaaccaagcggcggaagaacccggaaactggccgctgagaggattatgagggatatacatacaaggaccccctcccctgggccacggagagaaaagcctgtacctgatccagcgccacatggtcctgctgccggaggaggcgctggccatccggtggcacatgggcgcatacgatgacgcggccaaggcagacagccgcgccatggcggcggctatggcggcctccccgtgggtgtggcgtttgcaggaagcggacatgtgcgccgcctggatcgacgaacgggaggccgggcaatgaaaaaggagctttgcaagccatgtgccattgccctggagaaccgcggaaagaccgtaaaggccgccggagggcggtgtgagaaaatcacctgcgcggaatgtggccgccggcgtttcgggtacacctacgaggtgaccggctggccacaccgcaggaaaaaggaggacatgctgacatgagccagagaaaggccaaagaataccgccgcgccatggagcagtacaacggggtggccgaggatgtggacgatctgaaacgccgtgtcggagcgttggaggcaaggcactaccgggaggaccgcgacaaggcggtggacatgatccagcgccgtgcggcggcaaaaaagtgggaggaaacggtaaaggcaagaaccatgaaaaaagcggagcatgagcgaaaagcacgggcagaggaacgccggcggcggatcgcaaggcggaggctgatcaccctggccctgggcgcgcttgcggtggtcatgctcctggcctccgtgatcatgaccatcacggccaagccggcggcggaagccgcagaggcagagatcaccggcgccgccgttacttccacgccggtcgccctggtgaccgcagagccggacatgtgggacggcgagggagaggatccgctggaggcggagaaaatcgaggaggccctgctggcctccgggtatttctccgtggcggtgcctatgtgctacgaataccaggactacatgcggacctactgcgcggcctatgagtgcccctatcccctggccctggccgtggcagaggttgaaagccactttgatatgggcgcggtgggcgccgccggcgaggtggggatcatgcagctgaacccaggcccggagaatacatactggatcaacctggaggcagaaaccgagctggaccccaccaccccctccgggaacattgccgccgggtgctacctgctgggaatgtacatgcaggaatacggggacgcaaacaaggcggctatggcgtacaacatgggagtgagcggagcggaaaatgcctgggcggagggtatcacctccaccgactactccaccgccgtggtggaagccatggagcggtgggaggtcacagtgaacgcatggaatgggatataagccgggcaggaatacgggccgcggcagagcggagggcacggatccaccgctggcaggcaccgggccgcgccagagtggtacacccggcccgcgggtccgtagtggtcccgcacagttcaaacctggcggcgatcctgaacgcggcggaggtatggggctgcgactggacggagatccgggacgcaaaggtgtgggcggcacctggagaaaaggcggtcccaatgcctacattatataaataaggaggcggagcgaaatgctgatcaacgaaagcggcctggtgcgctgtatcaagcgggcgtataggtccgccgggtacgcggtggtgacccaggacgatagcatggcaatctacacggagcaatggtatgtccagtgcaagcgggcggccctgccccgcaaggtgctggccacaatcgtggaacacatgggcatgataccggacacggcgcccatgtccatcataaaggacggggatccgcagctgatcatgccggatgtggccagggacgaaacttcacactggagaaccggggaacgcacagacacggtgaccatggccaccgtgatcatgcagggttaccagatattccagccggagggcggcggcgcctgctacggcgtgagcctgtccgacctggagatcatggagcgggaaattgcagagcatgggcaggcaactgtggtagacggggaccgcctgctatggtgcggggacaacgaagtggtggccctggacaccgtgagaaaggcccggtcaagctgggcaaaggaatgggagcgggccgtatggaacgccatggagggcgtggatctccataaagaggaggcgtgacaatgccacagacgaattttgaccggatcaccgcctccccggaggtgctggccgctttcctggcctccctcccctgcctggaagccccgtgggatgacgctttccaccgggttttctgcgacaactgccaaacaacggactgcccgcaggtatgcccgcatgaagcggagcggaacagcccagcgtggtggctggagctggaggtgcaggccaatggagaaccgggcttttaatatggattgcatggaggccatgcgctccatgccggatcaatgtttcgacctggccgtggtagatcccccgtatgggatagatgcagccaatatgaatttagggctagggaaaacaaagaaatgttcaaaaattcaaaaccgaaatttcgggaaaaagggctgggataaaaatattcctccagaaaaatactttcgagaattagaacgggtatcgaaaagacaagtcatttttggagggaattacttcacaccatttcttgaacaagcacatagaggatggattgtttggtataaggggcaacaagggctaacaatgagcgactgcgaactggcgtattccacattcgacacaccgacaagggtggtgattataaatcgagcacagtttcaaaaagaagggtttaagatacatccgacccaaaagccggtggccctgtatgcctggatttttcaacactacgcaaatcacggggaccggatcctggacacacacctggggagcgggtcaagccggatcgccgcgtgggacgccgggcttgattttatcggatacgagatcgaccgggagtatttcgaggcccaggaaaagcggttccaacaacacaccgcgcaactgtccatatttggcgagggagtatctgatcacaatatacatttttagggaaatgaaaaccacctgcgcctggtgctgataacacggcgcaggtggacagatacgaggcggcgcggaggccgtcctggatagctgtattatagcatactcccggacggcctgcaagccgcaaaatttgacggggctgcggccccgtatagctccggtaagagcaattagtaaagtgaccagcagaccaaaaggaggagaacaccatggcctatgtccataggcgggtgaaagctggccgcaccatcgaacacaggaaaatgcagtcataccggatccacaccaagggggtccagagggggccgaaccacgggaccacatcggcaaagcaggccaagatcaacgagcgggtggcagaggagcacctgcgctgggacctcaacgccaattttggccaccgagatctccacgccgtcctccactactacgccaaggacaccagctttgaggaaatcctggaacacaaagccgttttcctgcggaacctgcggaagatctgcaaaaaacgcgggatcaagtacaaggccgtggtggtcatcgaaaccaaaaggatgacaaatccgcacattcatgtggtaataacgcacatggacccggagatcatcacggaggcgtgggagtttgtgccgaggggcggcgggggcgtcagcttcaaaccgctggaccgccgcgggaaccatgcaaagctggcggcctatctggtcaaagaaagccggtcaaccatggagaagtaccgggagatcgggaagcggggcaagaggtacagcaaaacacaaaacatggccaagcccgtgattacatacaccaccgtggccgcttcctcctggcgcaaggagccgaagccaagcaagggcgccgtgctgtacatgttcgatgacggatccaccacgcggagcgggtggcatgaaatcagcggttacccataccaggaatattttgaggttttcaacgaataggaggacgccatgaaaatttaccttgccggcaggatcgccggggatagaaaataccgggcaaagttccgggaggccgccaaggcgctggagggaatggggcatgtagtcctaaaccctgccaccctgccggacggactgacagacgcggactatatgcagatctgcatggccatgctgaacgcggcggatctggccgtgttcctgccggactaccgggagagccgcggcgccatggtggaatgggcgtactgccagaggattgggaaagactgcgccctatacatggacatgacagggggcggcagacagtgagcaaagcgcagatcagcatgtgggaggaaaagattgtggacagtttcgccggcggcggtggagcttccacgggaattgaactggccacgggccgggtggtggacatagcgatcaaccacgatccagacgccattttaatgcacaagaccaaccacccgcacaccgtacactatcaggccagcgtgtgggatgtggacccgctcgaagtcaccggcggcagcccggtgggcctgttgtgggcctcccctgactgcaagcatttcagcaaggccaagggcgggaagcccgtgaacaaacggatccgggggctggcctggatcgtcctccgctgggctgggacggtccgcccccgcgtgatcatcctggagaatgtcgaggagttccagacctgggggccggtacgccgcgggcgcccggtgaagtcaaaggccgggcagacattcaagcagtttatttcccaactggagggcctgggctatgccgcggagtggcgggaactggtggcggcggactatggagcgccgacaacgcgcaagaggtttttcctgatcgcccgctgcgacgggcggcccattgtgtggccggaaccaacccacgcgccagcgggcagccgggaggtgctggaggggcggaaaaagccgtggaggagcgcggcggagatcatagactggagcctcccatgcccctccattttcgacacgcgggaggaaatccgggagaaatacggcctttccgcccagcggcccctccgcccaaacaccatgcgccgggtagccagaggcgtggacaagtttgtgatcaaatccgctgccccgtttatcgtaccaatgggctacggggagcgggacggacaggccccgcgagttcacaatatcgcagacccagcacccacggcggtggggaaaggcaagcatggagtttgcggcccggccatggtgccgtggacggtgacaaacaccaccaactccacggggcaccccgtcaatgagccgatagacacggcacggaccggcggcggaggcggtcaaatgtttttgggggcctccctgatccagtatcacacggagcagtcagaacatgtgagaggccaggagatcaccgggccgatcatgaccattgacgcagccaaccgctacggcctgacggcggcaagcctggtcaaatactacgggaacgaccagcacggccagaacatccgagacccgctccacacggtaatatccaaggaccacgagggcctgacaactgcgcacctggtcaagatgaaaggcaccaacctgggagggcctgccacggagccagtgcagaccatcaccgccggaggaggccatcatggagtggtcaccacgcggatcacaagagcggagccgggcgcggatctcaaacactggccggagatccgggagctgctgaatacatattgcggctatgacctggggccggaggatgtgatcctactccagatcggcggcgtatggtatttcatggcggacattggcctgcgcatgctgacgccgcgggaactgtaccgagccaacggtttcccggatgattacaagatcgagcgggactataccggccaaacctacgggaaaagcaagcaggtggccagatgtggcaacgccgtgccccctccctttgccacggcgctggtgcgggccaacctgccggagtggtgcgcaggggtggagatcagcaccatggaggaactggaaagggcggtggcggtgtaatgctggaaatcgtccccatgacattgcgggaggccaacgcctttgtggagcaaaaccaccgccatcatggcccggtggccgggcataaattctccatagggctttcggacggagagcggatcgtgggcgttgccattatagggcgcccggtatcacgccacctggatgatgggtggaccctggaggtaaaccgcctttgtactgacggaagccgcaacgcctgttccatgctgtatgccgcagcgtggagggcggcgcgggcaatggggtataagcgcctggtgacatacatcctggagagcgaaaacggagcaagcctgcgggcagctgggtggaaatgcgtaggacaggccggcggcctacgatggaccggacgccggaggccggaggtagacctgtacccagcacaaatgaaaatccgttttgaacggacggcggaatgaggtggagccatgaacggaaagaaaaacatgcgccggatcagcgtcctggtgaccgcgcagacggcatataacctggacaaactggcggccatgtgcggctaccgggagcggggccatgtgatcgacaagctggtgagagaaaaaatgctgcaactgaacggaggaaagcgacatgaacaaaacgaaaattgactgggccaccatgagctggaaccccgtaactgggtgccgccatgggtgcccatactgctacgccagacggaccgcccgccgctttgacgccgggtgtgcggatcctgccccgctgcctggcggcctccatgtgctgacggagaaaatcaaggccacgccctacccatacgggtttgagcctaccatgcaccgctaccggctgaaccagccggagcgccaggaggagccgcagacggtttttgtgtgcagcatggcggacctgtttggcagatgggtgcccacctcctggatcgtggaggtcctggacgcatgcaggcgcgccccgcagcaccgctatttgtttctgaccaagaacccggccagatacctggagctggaccacatggccctgcttccacatgagagcaatttttggtatggcagcaccgtggcaaacgaggacgcagaagccatgtacaccatgcagggggtggcaataaacagcttttggtccatggagccgctgctggggccggtggacatgagcaaggcggagggactgccgcaatgggtgatcctgggagctgaaaccgggaaccgccgggaaaaagtggtgccgcggcgggaatgggtggatcagatcgtgcagttttgcgcggagaatgagatccccgtgtttttcaaggacaacctccgggcgcacttcccggatctcccgccatccactttcccatgggatgaccgagagagtaaaacggcaaagtgggccgccaacttcatggggcgctttgaaaggcaggtgtgaaccgtggacaaaatagaaatcggctacaccgtggaaaaagagcggtggctggaggccgccgaaaatctgcatgagtttggccagatcatggcgcggaacctgcggaacatgaaccgggacggacgcggacaggaggacgcggacgatcttatggcggacattatgctggcctgtacagcaatcggctatgtggcggagtttgccgtggatcaatgccggtttatccctatgccgggaggtggtcagaaatgagtgaacagaaaaggccggagatctgcgagtattgcgccctgggtgatcacgacgcatatatttgcgcccgctggcgcctgtcctatgccgtgaatgaactgaaaaaggcggtcccgctgctgcggcggacagcagaaaagcagatgaaatgcccgtactactaccccgccggcctcctgaaaaccggcctggtcataatggacgaaatcgggccgtggccgccggagagaaaggggagctgatcatgcgggcggtgcttttgagcataaagccggaatggtgggagaagatcctggccggcgagaaagatctggagatccgaaaaacggccccgcgggccggagccggagggccggagccgtggccgctgctggtcctggcctatgtgagcgggaccggggcggtgctggggcagttcctttgcatggggtgggtaaaaagcaactgttttcgctatttggcctcccgctcctgtgtgccggcggaggacctggagaaatacgccggcggaaaatccctgtatggctggatcgtgggagaggcggaggaatacgaaatgcccagtccgctggcggagttcgggctgacccgcccgcccatgtcgtggcagtacatagagatcccggacgataaggaggaatagggggacgaataaatggcaatcagtctttcagacctgccgccaaagtatcagcagcaggccatggaaaaatacaggaagcaacagacgcggcgggggcctatgccctccgccgccgatgtgcaggatccggggaagccgatgaagtatcgaaacaaccccaccgagcgggtcacctcctccggggccgtcatacgctttgacagccagaaagaggccaggagatacgaccacctgatcctccgccagcaggccggagaaatccgggatctgcgcctccaggtggattttactttgcaagaggcatacacggaccaggaggggcggaggatccgcgctatcagatacagggcggattttacatacagggagcgggacgggcgcctggtggtggaggatgtgaaaagccggccaaccaggacgcgggaatacctgatcaagcgcaaactgatgaaagaacagcgcggaattgacataacagaggtgtgagcatgaaccagcagacaacgggcggggctacccgcgaggccgtaaaagaatacttgcagcagtaccacatggcgagagagcgccgccgcatgctggagcgccgccatgatgtgctggcgcgggagctgcgggcgccggcacctggatccacatacatgaccatgccggcctcacaccccgcagcggacagcgagggggccgtgtccgttgtctttcggcttgcggaggtggaggaccgcatagaagcccagcggaccgccatgggacgggccgtcaccatggtaatggatctcattgacctgctgccggagaacagcatggagcgcaccgtggtggagttgcgacacatcgactgcaagaaatgggaacggatctgcaaagaggtacacatgagcaggtccagggtgaacgactactacaacgcagccctggacacgatcctgtccaataagcgggcgcagaaattggtgcaggattttgagcaggacaggggacacggaaccggcggagaaaaaagtgggccaatttgaaaagttcggacactatcggacattcgcctgtgttatgctggtatcgtggaaaaacggcaggggcaagagagcagaacccccgcaacatagagagaggccgccagggcgtgaagaacctggcggcctctgtgttttttcacaccatgggccggggagcagaaccgcaggggcttttctcctttcaccctgtcctgccgcattgtaccagagtgcggcgggccggcccgatccgggtggtgcccagggcctcctatgccgatggggtggccctgggcgcaccggaaaatcacaaccacctcccccgtttgggtcctttctggaaaataaatctttgcggggcaagtgaagcccgattattttccgcaaaaaatccaaaattttcaggggtgtttcgttacgcatttactaaaagcggggaaagcataccccctttagggggtatgggcaggaaaaggagcggtaaaaaacgcgaaatcgtccgcggcggaggatgacaaaccgacggagcgggacgatccgggccagcggcacaaaaggaggtgcagccggtggcggggaaaaagagggccggaacggccaaaacaggagcggacagcaaggcggaaaaagcgccggcggccctaactgctgtcccggaatgggcaagcaccacggcggtggccaaactgctggggaaaaccacccggcggatccagcagctcacccaggacggtgtgctggaaaccgaggtgccgcccggcggcggcgcccgaaaatataaaacctgcgaaacgatccagcgttatattgcccacatcgagcaaaaggcccaggaaacggcggcggccagctccaccgcggagctgaacctgcggaagctggaggcggaggtagaactgaaagaaagccagggccagctccacaagctgaaaaccgccattgccgaggggaaatatatcaaggcagaggaggccaccagggatctggcggacttcatggccatgtttaagaaattcgccatgaacatcccaccccgcgccgtgaaatccatagccggatatgcggacccgcaaacggccagggccatggaaagggcaatgcgcaaggagctggaggatatgctggccgtattcgttgacgcggcggagatcggaccggaggaggcagagccatgaggccgtacagggtaaagccgtacacggtgccatcgtggatccaccgggcgctcctgtccctgcggccagcggaacgcctgccggtttccaaatgggcggagaaatggcgggtcctgcccgacaccaacgccataccggggccattccgcaacagcgtgaccccgtatctggcggagatcatggacgccttttccaacgaggatgtggagcggatcgtatttgtaaagcccacccaggtgggaggcaccacggccctggagaatatgctggcaagcgccattgaccaagacccagcaccgactatgatcgtctacccctccaaggaactggcagggcggacggtggaggcgaaactggagccgatgatccggcaatgcaaaccgctggcagccaagtaccgggaggcggaaagtcaaaagctaaagctgaaatttgaaaccatgttcgtttttctttcgggagcaaacagtccggcatccctgtcctccaccccgatccggtatctgtttcttgacgaagtggacaaatttccgggagcctccaaaaaagaggcggatccggtttccctggccatagagcgcaccaagacctacaccacaaaccgcaagatcttcatggcctccaccccgacgctaaaatccggccatatctggaaagccaaggaggaggcagaagcggagaagcattatttcgtaccatgcccccattgcggtgagtacatcgaatttgtttttgcacagctgaaatggccgagcaaggacgatgtgccggacagcgccgagcgggcagaaatggcagcgtattcctgccaagcctgcggggccgtgatcacagaccaggacaaggggaaaatgctggccgccggcaggtggcagacggtccggcagaccgccgccaggccctccagcgtggcctattggctgaacaccctgtactcccctttcacgcggttttcagagatcgccaaggagttcctgcgttgcaaagatgacccggagctgctgcaaaactttgtcaacagctggctggcggagccgtgggaggacaccaaactgcgcaccaatgcggagctggtgctggaacggcagaccgaggtggaggcatacgacctgccgaaatggacaaagctgatcaccgccggcattgatgtgcaggaaaactgcctttactggacaatccgggcctggggagattacatgaccagccagaacattgcacacggacaggcgctttccatgaacgaggtggcgcagatcatgaacaccgagtttatacacccggacggacagcggcttgtggtgtccctggccttgatggacagcggagaccagacggatgaagtttacgacttttgcctactaaattcagattgggtgttgccaagcaaaggaaccagcaccatgctgtctaactatcgcctatccacgatcaacaaggcaggaagcaatgccaacggaatgacactggtactggtggacgggggaaaatacaaggacatgatcgccgcccgcatgaggaagccaaacgggcgcggatcatggatggtctacaaggactgcgatctggactatgcggagcaggttaccgcggagcataaagtgaccgagcgagtaaacgggaaagtggtgcagaaatgggtgccaaaaactacccatgcagataaccactatctggactgcgaggtgtacgcggcggcggcggcggacatgcagggcgtccgatccctctacctgcaaagccaagagccggagaagccaaaaaagccggagcctgcgccgacaccggaggaaaattggatccggcaaaatgaaagctgggtataaaacgggaggacaaaatggaaaacacgcagatgaagccggcggaaatgctggagcaggtaaataaagccattgcggcggtgctggtgggaggccagtcatacaagatcggcagccggtccctgacacgggcggacctgtccatgctgaaatccatgcgggacgatctggaggcccaggtggcagcgggcaccccctcccacctgctggatcggacctttgtggcctactttgacgggaggtgacggcagccaatggggtttctggacaacatcataaccgccatttcgccggaagctggctataagcgggaagcgtggcggcaagccctggaggagctgcgggggtatgacgcagcaagccatgggcgcttaaattccgggtggagggttttcaacgagagcgcggagctgacggaccgttacagccgggatgtgatccgcgcccgtgcccgcgacctggagagaaacagcgacataggccagtctgtgatccgagcgttccggcggaatgtatttggaaaggggtacaaactccaaccgaaaacagaaagcgaactgctgaacgatcagctggggaaactgtggaaacaatggtgccgcaaagaaaactgcgacataaccgcgtcccagtctttcaaccagatcatgcgcatggcagccacaagaaagcaggtggacggcgggatcctgttcgttaagagatacacgcggggcggcctggtgccgttcaaactccaaatgatcgaggtagacgaattggacaccaccgcctccataccgaggcacaagggaaacacggtggtgggtgggatcgagtacgatccggcccgtcgggcggtggggtattttatccagcaatacgatgtggagggctggaaactgaccaccccggtgtacatagaggcaaaatatgtgatcccatactggacaaagcggcgccccagccaactgcgggaggtgtcggacctggccccaaccattacgagggtgcgggacaccaacgaatttattacagccgtttccgtcaaggaacggatcgccgcatgcctggccgtattcatcaaacgcgcaaccccaacgggaggttttggacgcggcggcgtggtgagcaacggtgaccgtgtgacatacgagggaaagagcctaactcctggcatgatcaaagaaatgaatgtggggacagtatcgaaactgtggaaccaaagagcgcaggatcggacgcctcccaattcttgaaaatgcaatggcgcctgatcggcgccggccaaggcatgagctacgaggccaccagccgggatatgtcggaaagtaactattccagcgcaaggcaaggggcgaatgaggacgaagctacatttgccgaggagatcgagctgctgaccgagatcatgagcgagatctacgaaacctttgttatttcctgttatctcaccgggctgatcaacccgcccggattttgggataaaaaggcggattacatggcgcacaagtgggtgcaagcaccgaaaaagtggatcgaccccacaaaggaaaccaccgccacaaaaaccgccctggccacggggcaaaagacattccaggatgtcgcagccgaacagggcaaggactggaaagacgccataaacgaaatggccgaggtcctgaaatatggccgtaaagccggcattgagatggggggtgtaatttatggccaaggaacagcagcagaacagcagaacgcaggacaggaaccaggggaccaggtgcatggggcaaattctaacccgacaggaggaggggcaggacagccgcagacggacaattagcttttccagcgaggagccataccggcgctattttggcatggagatcctggaccatgcagccggagccgtaaacctggagcgcctgaacagcgtgggcgttctcctgttcaaccacgatgtggacaaagtggtgggacgggtgatccgtgcctggatcgaaaataaccgcggcatggcggaggtggaatttgacaccgacgccgacgcagaaaaagttttcggaaaggtgcagagcggaaccctgaaaaccacctctgtccgatacagcgtggacagctgggaggaggtgcgccccggcgccacatccgccgatggacggtttcagggaccgtgccagatcgccaggcggtggacgcccctggaggtgtccattgtttccgtgccggcagacgccaccgtgggcgtaggccgttccgacgcagacacggcaccggacctgtccgcatacgagcggcagatccaagtcaatcaaaacacttttaggaggtaaagagcaatgaccattcaggaaatgatcgccagacagcaggcgattgtgacccaggcccggaacgagggccggggcctgtcccgcgaggagcagacggagtttgaccagctccagggcaagattgacgctgcccgcgccgcaggcggccaggagggaacccagggcggcgcggagtctcccgcagacggcagccgcggcgccggggatcctgccggcgcagagggccaggacggcggaagcgacgcaaccagacaggccgtcgaggcggagcgccagcgcaacagcgacattgtggcactgtgccgccaggtgggcatggaccccgcagagcatatccgcagcggccacaccatggaccaggtgcgccaggcggcggtggacttcatgatcgcaaacggcggccccgtagcaacccggaccgatgacggccaggggaatgagttccgaaacgcagccgtggacgccctgctgctgcgggccggcgttcccgtgagcaatccggccagagaggcggagagcctgcgcggtatgtctgtgcgggatcttatgatcgagtgcatggcccggagcggcgagggaaccaccacttccctgctgcgcatgggaaagaatgacctgtgggacatggcggtgcgccagttcctttcccccacggcctctttccctgccattctggaccaggcgatccagaaatccatcgttcaccagtaccagaatgtgctcaccacctttgacctgtggaccagcaaggggagcctgccggacttcaagcccagcaaggcccatgaatacaccatcggcggcggggagttcgacaaggtgaccgagggcggagagctgaagcatagcagcctggacaccagcatgaacccgctgcgcaagctggacacctacgggacgcagttcaccatgacccgcgaggcgttcatcaatgatgacattggctttttgtccgaaatgccgggccagtatgcccgcgtggcaaagcggaagatcaacaagcaggtgtatgaggtcatcgtgaagaacccggccgtatatgacggtgtggccctgtttgatgacgcccacaagaacctgatctccaccggaacggcccccaccattgagagtgtccagaaaatgatgatgaagctgctgcgccagacggatcctttcggcgaaagcattatggtacagcccaaattcattctggtgcctgtggggtacggcttccttatgtcccagctgcttgaaaccgcgcaggttgatgtggacggaattggcagccacaccgcaaacgcgctgtacaagtaccggacccagctccaggtggtggaggagggcacaatcaatgccctggccggaaccagtgcggtgccctggtacatcgtaggcgacaagtccacggccaagagcgtccaggtggactatctgaacggcgttgatacaccgagtttccgccggagtgaaaaggccggttacctgggctttgtgtgggacatttggcttgattggggtatcaccgtcatggaccaccgcggaatcgtccgcaacaacggtgtggccatcaccgagtaaggaggtaaagatcaatgaacgcgagatattggcagaaaggcgaaaccctggactacaccgccaccaaggaggccgtgaccaacggccaggtggtgagcctgggaggccggatcggcgtagcgggaaatgacattgccaagggcgaaaccggcgccctgcatgttaccggcgtgtttatcatggaaaaggccgcctctgtgaccgtgaccatgggcgccgccctctacttcgacgaaagcgaggagaagatcaccacggtggcggcgggaaatgtccctgccggctatgccgccgcagacgcgggggcaagtgacgccaccgtgctggtcaatatcggggatcccaacggagcagccgcggaggtggccgccgtgcatgacagcctggcgctgaaagatacgagcgggaaagtgtatgacattaccgtgagcacatccggcacactgaccgcaaccgcgagggagtaaggaggtaacgggccatgaaaagactgattgcagagcggtccgtgctttacctggggcgcatgtacgccccaggtgacgccctccccgccagcgacgggatcatggtggcggcctggctgagagcaaagagcgcaaagtggaccggagaggccgcagagccgcagcagagcgcccaggaggacgcggcgaaaacggacgggtcccaggatagccagggacagaacgagagccaggagggcaaggaaaacggccaggaggccaaaatggtggagggacacctggatcccgaccaactgtccaccatgaaaaagtccggcctggagaagctggccgaacagctgggaattgatatttccgacgccaagaacaacaaggagcgggcggagctgatcgcgtcagccaccgtccaggtccctgaaaccgaaaccgggagcgcccactgatgggcgcccccagtttcaaggatcttgtggcggctgacattttcgatgtgttcctgaataaacaggagcatgcggacacccacaccatagacggaaagcccatgaccgtggtggtagatgaaaacgaactgctggagcgggacaaatcgaaaatggggatccaagtggatgggacatataaaagccgccgcctgatctatgtggccaaagatgaatatggaccgcgccccgcctacgggaaacagatcgactttgacgggcgattgttccgggtggctgattgcacagaggaggccggcatgctggccatcacgctggaggcggtgagatcgtgagcgatacgcagacaattttgcagatcgacacccaggcggagattgaaaaaatcatccggcagctggacaccctgcccaataagctgaaagcccccagcgtactggccagcgccatcaacgcgacggccaacgagatgaaaaagaaaattggccaacgagcaaggaaacgctatgcaatcagcgacaagaagatcctaaccaaaaaggaccgcggcgggatgtacctggagcgggccaccggatcctccagtaccgccacgctgatctccaggggtggcatggtggaggccatggcctacatgaccaggaagaacaccgaaacaacggcggccatgctgaaagtcctgaacgaaagcgccatgaccgcgctggaggtagacgggaggaaagcgtttcaaaccacattccaaagcgggcatacggccattgtgcagcgcgtaggccgcagcagattgcccgtaagatcccttatggccccggcggtcccaatgctgtatggaaagagctatgaggaggcggaactggattattacgccatcctgcaacggcacatccagcgagaagtagagcgggcgctgggcagtttcggaaatgcggcataaaaaggcggccccattttgcagggccgccgggaggtcagttattataaaaatcttcgctggtatatcccatttgcaaagcaaggaaatatatgtgcttgcacggtttactgcgcttttcaaaatcagggcatgaacaataatccagcgttgtggtgtatttggtgccggtggatccgctgacctctgcggtcccggtgtccacatcatagctgatcaacccaagacattcatgggacgccttttcaaagcggtccgactgcgccgcaccgcggtgtaccttttcgttccattccccaaacgagtggccaaccgggcaccgcctgctgcggatggaaaccaattctgtttttctgaccggaaacacaagcgaatacgaaacagtttcccggatcgtttcgctcccctcccgcccctctattgtgcggagttcgcttgtttccgggtgcccctttttccattggccatacgcggccaaggcggcggcaattacaacgccgccaccaaacgcttgaatttcgccggtgaacaggcacacaagcgccaagaccaaaaccacgccggcagcaatgtacaaccctttccctttcatttcatccacccttttcatacgccgatatgctgattattaccacaaaggtgattataaggcacaatcggtaacaagtcaaggaggcgcggcagcgtgacgcaagaatttttacaggacgccatggtggcggatctaaaagagcttttcagccatgaacggctgaaaaattccctgggcgtggagcgggagatccagatttacccccaggatgttccgatccgccggggggacgatgaagccatagacaaggaggcgccgccggagccgtatgtggtggtgcgtctccggggcggaaagacagaaagcgacgatgatccgcagatcatcgacgcggttttggtggcctgtgtctatgacccggatccggggcgccaaggctaccgggacgccttgcacatcatcaacaaaatttaccatcactattccgcttgcgccgtgatcggcaatcgctgggagatcctttaccccatggagtgggtcacccaagaggaggacacccacccgctttatctcacagcaatgtccctgcggatccaggcgccggcggtccacaaggaggtgccagaggcatgacaacaaagaagcaagcaaaggcggcggaggaggccggaaccctggtgtactgcggtccaaccattcccggcgtggccaagcagttcacattttaccggggcggcgtcaccgcggggctgaaagcggcccaggagcgcaggccggtgctgcgcgccctaaccataccgctggatcagctgccggaggccatgaagcagctggaaatgaaacatggccgcatttacgcactgtaccgcgaggcgcagaggcagaaataacaggaggtaaagcaaatggcaacctatcagcatggcgtgtacaaccaggaacaggccacgagcctgaccacgccgatccagagcagcgccgccctccaggtgattttcggaacggcccccattcacctggcggacgatccggccaaggcggcaaacacaccgaaactgtgttacagctttgcggagtgccaggccgccgtggggtattccgacgacttcgagaatttcacgctttgtcagagcattgatgtgaatttccgggttttcaacaatgcccccatcgttctggtgaatgtgctggatccgaacaattccaagcacatcaagcagaacgaggcgaccagcgttaatgtgactgacgggcaggcggtctacactgtgccctatgccctgatcagcaccatggaggtcaagaacggggacgccgcactggtgaaagataccgactacacggcggctcacgacgatgacggaaatgtggtgatcacactgatctccgagagtgcgcaggaagcggaaagcctgtccatttcctccacgagcctgaacccagccggcgtaaccaaggaggatattgtgggtggcgtgagcagttccaccggggcggaaaccggcctggagctggtgcgccagatttaccccaagctgggactggtccctggtattctgctggcccctggctggtccgacgatcccgtggtggcggcggccctccaggcaaagaccaccaaaatcaacgggaatttcgactgcaacacatatctggatattgccgccaacagctccggtgcaaccgtgtacaccgatgtgaaaacggcaaaggaaaaactgggcgcaagttccaaccatgcggcggttttctggcccaagggcgcggtgggcgaaaagatctattgcctgtccgcgctggcggcggcggaaaccgccaacaccgacgcaaccaacggagatgtgccgtttgaaagcccgtccaataaggccctgaacattaccgccaccgtgctggatgacggcaccgaggtggcgctggatcaggagcaggccaacctgctaaacggccagggcgtgatcaccgccatcaactccaacggcttcaaactgtggggaaacaacacggcggcctacccctctaccacggatccgaaagaccgctggctggcggtgcgccgcttctttgactgggatggaaataatttcatcctcacctactggcagaaagtggacaagccgggcaataagcgcctgatccagtccatcgtggacagccagaacatcatcggaaacgggtatgtggcccgcgactactgcgccgggtatcgcattgagttccgggacgatgaaaacccgatcaccgacctgctggacggaaagctgaccacacacacctacctggcgccctacatccccgcggagaagatcgtaaacatccgcgaatatgacaccgcggccctggaggccgcactgacaggagggagtgactaaaccatgagcaagaatatccccaccaaaatcaacaactacaatgtgtacaacgccggggacaagctgctgggcgtgggggatgaattgaccctgcccgacttcgaggccacaagcgaaacggtgagcggagccgggatcctgggagagatcgaagatcccacaatcggctatttcggaaacatgcagctggagatccctttccgaactctggacaaagaggccaccaacatgatggaccagaccagagcggtccagctgacgatccggggcgccgcccaggagatcgacagctccggcaacatcgtgcccaagtccatccgcgtggtggtcagcgggcgggccgcaaagctgaccggcggcaaactgaaacgggccagcactatggacagcggtgtgaccctgaacatcctttacatcttgattgaggtggacggggaaagcgtcctggagctggacaagatgaaccccacatacaaggtcaacggcgtggacctgctggcagagtataaggagatgtgctaaatggacgaaattaagaccaacgccgcccaggagccggcggaggaccaggaggagagcctgatcctgaaattcagaaagccgtatatgttcgagggcaaggagtacaccgaggtggacctgtctgccatggaggacatgacggcggaggacctgtgcgccatgggcaagatcatgaccaaactgggcattgtgaaccctgtggcggaaatgaccgtggattatgccatttacatggcggcccgcgcctccggcaagccggtggagtttttcaagggcctgccccccaaggagggcattaagctgaaaaacatggtcacgggttttctctacggcggggatggagaggactaaccccgccagaaattagaaaagcctgcgtggggctttcgttcctgctgcggacaggtgtggactatttcatgcacctgtccgtgcaggaattacaggacatagcggaggaggcgatcaaactgtatggcaagaggaaaagtctatgatctggcaatcaaaatcgccggacgggtggacagctccctgaaaaaagcctgcctggacgcagacgaacagctgggagaactggccaagacagcggaaaagatcggcaaagccgcaaaggtggccgccggagtgacaacggcggccatcggcgcggtgggcgtagcctccgtgaaagcctacacggaacaccagcaggcagccaacagcatggcggcggccaccggagccgccggtgagcaactggagtatttgcaggacgccatggacacggtgtacaccgacaactacggggaaagcctgcaagatgtggcggacgccgtgtccctggtggaccgcaacatgaaaaatatctcgccggacgaaattgtggaggcaacggaggcggccctggccctccaggacactttcgagtatggcgtggaggaaagcacacgcgccgcggcggccatccaaaagaattttggtggatccgcgaaagaagcatttagcctgattgcggcgggtgcgcaaaacggccttgactactccggggaactgatcgacaccatcaacgaatattccagccaattctccaagctgggatttacggcagacagcatgttccaactgctgcaatctggcgcggatagcacggcctggaacctggacaaagtgggcgacgccatcaaagagttttcaatccggtccattgacgggagcgacaccacggtggcggcgttccaagccctgggctacaacgccagcgacatgatggaaacctttgccggcggcggagaggcggcaaacaaggcgttttacgatgtgctgaacacactaatggatgtggacgatcaggtgcagcgggacgccatcggcgtttccctgttcgggaccatgtgggaggacctgggggcggaggccatgcaggccatggcggacgcctccacggcggcctatgacacccaaggggcactggatcagatcaattctgtgcggtacaacgacctggaaagcgccatgcggggcgtgaaacgacaggcggaggagatcctgtggaccatcggggaacagctggagccgtacatattagacggcctaaatttcctatcagcaacagttatccccaatgtgcaggccgctgtggaaaagctgggcggatatgtggaaagcaatgtgatcccggcggccaagaccgcggcccaatggatcggagaaaacaaggacatgctgctgaccctggccggagccattgccaccgcggtgggggcctatatggccctgaaaaccgcagggcaggcggcgggagccattaaggggatcggcacggtgctgggaacggcaattaagcaaggcggactactgaaaacggtggtgggcctgctgggcggccagttcactgtggtgattgccataattgcggcggtagcaggcgcttttgtgatcctgtggaaccggagcgaaaaattccgaaattccgttatggggatctggcagagggtgcaaccgctcattcaggcatttggaaacctggtgagcctgatcgccaccagtctggcccccgtcctggccaatttgggcaccgtcgtgctgggcggcctggaggcggcgtttgtggccatggccccgtacatcgaaaatgtgatcacaattctgacgaatttgatcgagtttatcacgaatgtattttccggcaactggtccgccgcatggcagaatgtggtaaatattttcggatccgttttcgggatgatcgtgaatttggcaaaagttcccattaacgcggtgatctccgccatcaactgggttatttccaagatcaacagcatatccgtgacgatccctgactgggtgccgggcgtgggcggaacgacgctgggtttcaacattccgacgatcccggcgctggccgccggcggcgttgcaaccgccccaacactggccatgatcggcgagggcggggagccggaggcggtcatgccgctgtccaagctggcggagctgctggacgagtggaccaaaccgaaaccgcagggcggcggaggaggccaggaggacgccggcggggatcacatcgtatggtcccccgtgttcaacttctacgggaacacgaccaaggaggaagctgtggccgccgcaagaatgagttttgcggagttcaagaaaatgtataagcagatgaaagccgaggaacggcgcaagagtttttccccggcataaggagggccacgcatggcaggaacctataccacccaacagggggacgcctgggacgctatcgcgcacaaggtatatggaagtgaaaaatataccggctggcttatgcagaacaattttcccctgctggacattttcgtgtttggggcgggaacggtcctgcaaacgccggacccgccggaggatgacgaaacggccaatctgccgatctggaggacgcaggcatgaaaacacgcagcgcggaggtggatctaacctggaacggcgcggcagtcaaaagcaaaatgctgggccaaacaacagagatcacatacacggatccagcaagcggagaagcggacagcctggatatttcgatccacgacagggaccgccaatggacggtggcgtggctgccgctggagggcgacacgctggaggccgccatcaaaatttccaactgggaccgggagggcgacaaccgcaccctcccctgcgggtttttcatcctggacaatttcgagtttgcggggtggccgatcaccgggaccatatccgccgtgtctgtaccggcggacggtgcatttcgggaaaccgaacggacaaagacatgggagaaagtcacggtccaggagatcgggaaagagattgcaagccgggccggaattactctggcctgggatgtggaggggacgccattcacgatccaatccattgagcagtcaagccagacagattgtgacttttacatgcaggtgtgcgagagctacggctacgccatgaaagtgtatgctcaaaaatcgtggtatttgaccgcgaggcatacaagaaaaaggacccggtgctgacaatccgggagagcgacattgaaagctggagctggaaaaagaccctggccgggacctacaccggcggggaatacacctacacggacccgatcaccgaggaggagatcaaggccacggtgggaacgggcacaaggatcctgaaacaatccggaaaggccgacaacctggcagacgcagagagaaagatccaggcggcggtggacagcgcgaaccacggacacaccaccatttccatgaccatcaccggaaatgccacgctggtggccacccaatgcgtcacggtggtgggcctggggcgcctgtctggaaagtattacatcgacagtatcacccaccatgtcgggaacggctacaccatggacctggagctgtcactggtggaagccatgaccgaggaagtgatcaaggacgccaccgagaggctggctgccgtgggcgtcatggcctccccggaatattgggtggcccattacaaggatgtgaagaacctggacggcctgatcctgaacatggccaccaggatcaaggtaaaccagggtgggacaagtatcacaacggtggacgcggcgctggatgtgctgacaaaaaccggcgtgatcaactcccccgactactgggcaaccgcttacacctccctggcgtggctggacaccctgctgatcagcgcggccaacgcactgacggcggattgagaggagggacacatggcaaacgatattttccgagtgggaaaggtttcgtccatcgactacgccgccggcctggtgcgggtggcatatcacgacaaagacgatagcgtaaccgcacccctgccaatgctttgcacggagtacaacatgccccaggtgggcgatccagtcatggtgctgcacctgtccaacggaaccgaggcggggctggtgctgggccggtattggtcaaacaacaacaagccccggagggtgcggcgggcctgttccgcaaggatctggaccggacgccggggaaagccatgatccggtacgacggaagcacactaaccatcaaatgtgccggagccatcaacatagaggcgggcggcgccgtaaccatcaacggggccaccattgacctgaattagaggaggaacagccatgccgcaggcggcaaggataaccgacgcggtggcagggaccaccgcgggggaacacacggggcatgtgccgccacattccccggagcagttcagcggggagatctccggggcatgctccgggaccgtgcggatcaacgggctggctgccgctacggtgggaagcattaccaccgagcgggacgggtgctgtggatccagcgagggcaccgtgggagctgggagcgggaccgtacggatcaacgggaaagcggcggcccgcatgggcgacgccctggcggcacatagcgggagcgggaccgtgacgggcggcagctctaatgttcggatagggggataaactgtgaccattggaacactggggagccgtatcgtgttcgaggtgagcgacgaaacggccctgatcctccaggaaatgaccagggagatctccgggcgctgggcaatccatgaaaccatgggagcaaagccgaaagcggagtttttggggcctggcctccaaagtgtaaccctgcccatttacctgtccgccggcctgggggtacgccccaggaccgtgctggagcgggtggagggcatggtggaggcagggacggcggaatatctggtgatcggaaacaggccggtgggcgggaacccgttccgcctgaccggatccagcgaaacatggaacaccatatttaaccgcggggagctggcgaaagccacactgtccatcaccctggaggagtacgcatgaatatttcaccatacgattttcaactacaattcactttcgcctccgacaagctggcggagctggaccgaaaactggccctgctgtattccaccagggagggaaccatgccgctggatcgggagtttgggatcaacatggattttgtggacatgccgccggaggtagcaaaaagcctgtatgtggcggagatcacaaaaaagacggcccaatttatcccggaggtgcgggtgcaatccgtggagtggacccacggaggcgagggacaattttttcccaaggtggtgatcacaagtgcctgatatgtcggcaatcgaaaacacgccagagatcagtttcattgacaataagactgtggaagatgtacgcagcgaaatggtggcggactatgaggaatacatgacaaacgcccagggcgtggctgtttccctggaccgggccagcgtccaccgtatgatcctatacgccgcagcggcgcagatttaccaggccatgcagtacatagaccgccagggcaaacaaagcctgctgaaatacagctattccgactttctggacaatctggcgatctttaagggcgtgaccagaaaccaggcaacggcggcaacatgcaccctgcgctttaccctttcggcggagcgggaaacggccacggcaatcccgcagggcaccagggtggcctcctccggggcggtgtactttgccacggatgaatatgcagagatcccggcgggcagcaccaccgtggatgtgccggccacctgcacggaaacaggaagcgcaggaaacgggctgaccgccggagagctgtccaccattgtggatcctgtcccctatgtggccagcgtaaccaacaccaccaccacggagggcggcgcggagattgagagcgacgcagacctggcggagcgggtctatctggcgcctggcgcctattctacggcaggaccggaggacggctatctgtaccactccaaagcgtacaaccccgccataggggatgtggtggccaccagcgaccaggaagcgggaaccgtggacattgttttcatcatggcggacggatccacaccggggccggaaatgatcaacggtctgaaaggctacctgaacgacaaaacgatccgccccatgacggatctggtcaatgtgtcggccccggaggaggtccaatacaccatcaacctgacatactacataaaccggagcgacagcgccaaggccgtgaccattcaagcggcggtggcccaggccgtggaagattataagacatggcagcggaccattgggcgagatataaacccgtccaagctggtggcgcttattatggaggcgggcgccaagcgggtgaccgtgacggccccaacatacaccgccgtggccgccaccaaagtgtccgccctccagggcgaggccgtgatcagttacgggggctggaagatgattaaactttccgggagccggtttaccgatattgcgccggagaacctggcaagccaggtagaagtccaggcgattgcctacgcggtagggcggcaggtggaaaaactgtgcgcatactctgacgcagcgcggacctatgcggccattgccaccatgccggagtggctactggattacatggcggtggagctgcgcaccccgtcctatgatgaaaactattccatcaaaaccaagcgggcgctgatcgaggggtccctgttgttttacacgcagatgggcacccccgcggcggtcaatcggatcattgaaaccatttttgaaaccgggtacatcgaggagtggtacgagtacgacggagagccgcatcatttccgagcctatgtcggggacggcggcgaggtggggccgggagagctggaggagttccggcgggtcctgtcctctgtcaagcgcctttcctcctggctggatgacattatcaccattgcggtcatggatcccgcggtcctgaccatcacgggggccatggggcggggctacatgtccaccgccctgccggcggcgcccatggactacaacctggaggcaccgatccgagcgggcggggttttcgggtccattatgcagaccgccatcccggcggcggattaaggaggaaaaaatgttttacggatttgtaatcacggaggccggcaacaacatgctggccaacatggtggccggcgataagctgaccatcaccaaggtggtcatggacaaggggaccgcggaaagcgcaaacgcggccaggcagcttaccgcccccattgacccaggcccgaacggaaccagcatcacgccgacggtggacggagccgccgtcaacatggtggtggaataccgcagcgacctgaacggagggctgcaagagggtttctggatcggcggtttctgcgtgtacgcaaagaccgaaaccgtggcggaaacaatggtctattacggatccctgggagatcaaaagcagtatgtgagcgcctatgtggaggggaccgccccggatgtgcgccgataccccgtttccatcaccgtgaccgccggcgtggaggttgatgtgtcctatccggcggaggcatggatgaccgccgaggatgtggcggagctgttcaacgacaccctaaagccgcagctggaggcaagtctggatgatctgatcgacgatcacaacgaggacccggaggcccacaacggcgccctgaaagacaagcaggacgccatcaaggtggagggcctgctgaaagggaccaaggccaccggagagggcggggacacatacagcgtaggggcggccacaccgggcaccgattaccagccgcccaccaacaccctgacgccggcggaggccatgaccacgcaggattacatcccgttctatgaccacaccagcggccagcacatgagggccaccctccagagtttgaaagaggccataggcgtacaaagccccagtattaaggtaaccacctgcgcgggtgccgccgttacctgttcggacggggaaaccaccctgcaagggacggggacaacggagtttgagctgccacacatcggggaatggaccgtaaccgcaacactggacggagagagcgccagccaggaggtggaggtaaccggcgccctgctgtatgaggtggacctgatgatcacaagcggggtggcggtgaccacgcagcccacaaagaccacctattacatcggagaagcgtttgaccccaccggaatggtggtaacggcgacatttgcggatgacacaaccgaaaatgtgaccaacgattgcacattctcccccaccagcatttccaaggacaccacggccatcaccgtgaactatcagagggcagggatccagaaaaccaccagcgtcccagtgactgtacgggtgctgtccagcattgagatcaccacgccgcccacaaaaacggcgtacaaatatggggaaatattcgaccccaccggaatggtggtaaccgcccactacaccgacgggcaaagccggacggtgaccgggtacgccttttccccaaacaccgccctgggcatgagcaacaccaccattacgatctcttacacggagggcgatgtaaccaaaacggacacgcagaccatcacggtggccaaggtgctggaccatatcgccgtaaccacgccgcccagccggaccagctatttctccggggagaatttcagcaccgccggcatggtggtgaccgcctattacaccgatgacagcagcgcggcggtgagcgggtacacctattcccccactggcgccctggcggcgggaaacaatacgatcaccatttcgtacagcgagggaggcgtgaccaagaccaccacccaggccatcaccgtgaccacgatcagctccaccctgaacagcaattcgtgggccaccatcaaggcggtttccgacgcaggccagggggacaactattgggatgtgggcgacacaaagaccatcaccatcaacgggaaagtggggaatttcactttttccaacctgtccattgccgtctttatcctgggtttcaaccacaacagcagccgggaggggagcaaccggatccacttccagatcgggaaaatctccaacaagctggtgggcctgtgtgatagccaatacggaagctatccgagcgggtccgggtacttcaacatgaacaccagccggaccaataccggaggctggaacagctccaacatgcggcggaatatcctgggcaacaccgggacaccctccagcccgccggcaaacacgctgctggcggccctgcctgcggatctccgagccgttatgaagtctgtgaccaagtacagcgacaacaccggcggcggatccaacacggccagctatgtgacggccaccaccgactggcttttcctgctggcggagtttgaataccacggaagccggagctacgcaaacagcgcggagcagaattaccaacagcagtatgcctattaccaggcgggcaacagcaaggtgcattacaggcacgacaacacgggaacggcggtctatgcgtggtgccggtccgtcgatgcgtcgaacagcaactatttctgccttgtcaatacggacggcacggccgccaccggcggcgccgacgattcatgggccgtggctcccggctttgccgcctaatccgccgcagcggatcccgcccctatcccgtccgcgaaagcgggcgggaaacggggccgcaaacactgtgagaggaggacaccaccgtgtccgttctgaaagataagaggaccacaagcaaagcggaatatgtgaatgtggccaaccagatttatgtgaaaaccgtggattttctttcgagggtgtccccgcgatattcccggctgattgcggcggacaccgcacacctggccgggcaggtcatggatcacgcggaggaagcaaacaagatctatccgtcggaccagctgcgcaaggatctgcggaaaagccaccacctggaggccatggcccacctttcggccctggatgtgcgcctgtcccattgctatcaaattttgtactgcaatccgcagggcgctttcacggacggaaagggccacaaggtgccggccaaggaggccatggagcgactggacaatatgagccaggacctgggggatctgattaaccaggaagccgatctcctaaagggagttatggagagcgataaaaagcggaaataggtcatacacgggtgtatttctgaacaagtgccgtgtggcagggcggcaggcggcggcggtcaatgcgtggtgccggtccgtcaatgcgtcgaacagcaacaatttctgccttgtcaatacggacggcacggccaacaacaacaacgccgacaattcaagggccgtggcccccggattttatagaatgggttgaaagcggacgcggtgcgcgtcccgaacccgtataaaaggaggaatacttccctggcagtcatgcctaaaactgcccactgacggccaaacacggacgctgcttgcatggcggggtattgcgctatccccgtttcatgtgtcgggccaaagtagtttatacgcgcacctacaagacaactatgcggagggcgaatactttttattatgaccagcgaggagcgccgggaggcgcgttacaaacgccgccaggaacgacggcggcggaacaggcaaacccgcagcgacaggctgggcggcctggagggcgttttcagttaccacaccatgtttaagcatgggaaaaagtgctgcaatggggtgcgctggaaagcgtccacacagaactttgaactgcacttgttttccggcacggcgaaacgccggcgcgaggtgctaaccggcaaatggaagccgggaaaaaccgtatcattcccgctgtgtgagcggggaaagtttcggatcatcgacgcgccgcacatcacggaccggcagatccacaaggtgctgaccaaggaggtactggcgccgctctactgccccggcatgatctacgacaacggcgccagccaaaagggcaagggcctgcattttcattacaagaggctaaaggaacacctgcgctggcattgccggaggtacgggagaacaggggccatgttcctgatggattttcaccactttttcccggaggcgccccatgcgctgatatacgaacgacaccgggagctgatcctggatccaaacctgcgggcgctggcggatctggtggtggcagcggtgccgggcggtgtgggtatgccgctgggcgtggagccgagccagcaggaaatggtggcgcttccctctttcctggacaactggatgaaatgccagctttcgatccacggaatgagccactacatggacgattacgacgcggtgctggagagccgggagcgggcggagcgggtgaaagcggaagcgatccgccgggccgaggccaaggggctgcaagtgaaccggaacaaatgccatgtgattgacctggacaagccctttcgtttttgtaaagccaagtttcagattttgcccagcgggaggatcatcacacacgggtgccgggacggcatgaagcgggcgcggcgcaagctgcggtatttccgccagcaggtggacactggggaaaagatcgtggagcaggtggcggaatggctgaaaggcccaatcgcctactatgagcaattcaacgaccatgggcgggtgctgaaactgcgccgcctgtattatgccctgttcatcaagggcaggaaaaccgaggaggtaaaaccatgtatcggatcgtaaaagacggggcggccctggcgctgatcgaggcccccacctatgtacggcaggcaggaaacgggtgttttgtgctgtgccaggaggaccaggcgacggggattgcctacggcgggaccgtgtaccacctgctgggccgggaggccgtggagggagccgagagcgtgatcctggaggaaacggacgctggggaggagatcgagcggacggccaccacaaacgggatcgtattcaccaccatggcggaggccggatccatcgacaatgtgacagcggcagaacacgcggacctgttttccccgtgggcttacccagtcaactatacggcgggacagatccggcgctacacggacgggaaactatacaaatgcctccaggcgcacacaagtcaagctgactggacaccggacacggcggtgagcctgtgggtgagcatttcggatccggcagaggaatggccggagtggtcacagccgttgggggcacacgatgcctacgaccagggcgcaaaagtgagccacaacgggaaacattggatcagtaatgtggcggcaaatgtatgggagcctggtgtgtacgggtggacagaggcagaggaaaccgaaacagaaacggaggcgtaacccatggggaaagcctatattgtcaagcggcgggcgaggatcgacaccatcaccgggccggtcaatctaccctatggcaccgaggtggaggccgtggaggatcgcctgacctatcaagggcgccagctgtgcgcagtaacgagccgaaaggcgcacctgtattttgccaggaatgatgacgggcagggccaggagcggggcgccctgacgctggccatcacaaaacggctggagaagcgggacaaggaccatcaacggcgctgggatctggtatgggaggatcccgtgtgccagaaataccggcacccggagcatgaggatcattttctgtggggccacgcatttttcgaggccccggtggatgacctgcggcacattgccgcgctgatcggcgcaagggggtgaccgccatggataacacacggctggtgacggagctgtgcgccatcattgacagaatgaatgtgattttacaggcccaagccatggagctggcgcagctccacgcgctccaccacgaggaggagatcgcggcagtccgccgggactatgcgcgggccattggggaggtggccccatgacggcggcggaggtgctgaccggcggcgggatcatcctggtggccatgacgctgatccagattgcccccattaagctggatccgtggtccgctgttgcgcgggccatcgggcgggccatcaacaaggatgtgatcgaaaagctggatgaaacccgcgagatcctggacgcccacataaaaatggacggagccaggacggcggacgcgcaccgggccaggatcctgcaatttaacaatgaactgttgcgggacattccacacacgcgggaggaatttattgaaattcttgcggagatcgaccaatacgaaaaatattgcaaggaaaacccggactaccagaacaaccggaccacccatgccgtggccaatatcagccgggtatatgatgaccggctgatcaagcacgattttctaaaggaggaaacgccgtgaaaagcctgattgtggcagctgccgccatggccctgggcaccgccctggggtttctgatctgcggcgccaccgtccggcacctgcgccaaagggtgcggaccctgcggaggcagacaaagaccggaccgcccaaaaagatgggcgtcatggacaaggtgctgatttttgaggccgtgatcctgattgcctacaccgtggcggatctggcggtgttctggcatacaggggccgagccgtacaccctgacgggctgcgtgttcggcgtgtgcggccttgaaaacggcgtaatgggatggatcaagaccaacaaggacaaggcggcggaggccgccagaacgagcgggaacggccaaaaggccgaccaggaagaaccacccacggagcgggcggaaccgtccgatgtggggatttaaggagggtttaccaatgacagagaaccaactgcggcagaatgtggccaacattatcaacgcatgggtgggcgcaacaaagggaagcgccaagcacctggagatcctggagatctacaacgggcacgagccgctggcccgcggctacaaaatgcaggtgaaagacgcctattgtgcggcaaccgtcagcgcggcgtatatcaaggcggggattgcggagtacaccgggacagagtgcggcgtggaaaagttcaccgtggtggccaagaacaagggaatttgggttgagaacgacgcacacacgccaaagatcggggacgcctgcgtgtacgattgggacgatagcggaaccggcgacaacaccggatccggggaccacatcgggattgtcacccaggcgggagcctccactttcgtggtgacagaggggaacatgtccggcggaaaagtgggaaagcgcaccatggcggtgaatggaaaatacatccgcggctttatctgcccggactttgccgccattgcaaagaaaatgggcggcggatcctccgacacaacgggaggcgccacgatctacacggtgaagtccggggacaccctttccaagatcgccaatacatacggcacgacggtggacaccctggcggagatcaacgccatcaaaaacaaaaacctgatccgggtgggacaggtgatcatgctccaggacacggcccaggcagctgccgacaagctggaggcgctgggcgtgatcaattccccggactactgggcagacgcggcggaggccgggaaagtccaatacctggggatcctgctgaaaaaggcggcgcagactatcacaaaggccgggacgcgcaccaatacgccggaggagggcgtggccgccctggtggccgccggcgtgatcaatacgccggagttctggctggccaattacaacacattcccctccctggacctgctgctgtgcgccctgggcggggctgtgaaataatcagaggaggacatacacatggaaaccattatgcagtacattcccctggcggtgtccgccatcctgctggcggccctgatcctgaccgtgatcaccaacatcatcacccaggtggtcaagaaaatcacatgggataagatcccaacaaatatcctggcggtggtggtggccatggccgtcacgctggtggcgttctttgcggcctgccagatcatgggctgggctgtcacctggtacatggtggccggcgcggtggccctgggcctgttcgtcagctatgcggccatgttcggatttgataagctccgggaggccctggagcagatcaccaactggggaaaagacaagacggaataaagaggacccccggcacctacatggtgccgggggctatattatagattaaattacactatcatcagcggagacaatgcaaatacctccatttccaacatggaacacattgccaccgtcatcagagtaggatttcacgccgctgtgtcgcttacttccatcatacatgtttgtttcgtattcccattcagggtgacgggtcagttttccgaccacttcaaagccaaccgatttggcgtattctctaattttcataaaaggcccctttccgccagagggcgcctgatccaccggatcaggcgattgcctccagctccatatcttcaatttcggcccaagtaaatcccaggcggtgcatatcgtccccaacattggaaaggaccacgctggcctccatggtgagatccgcatagcaaagagcggcgaacatcttatagacctccacggcccgctccatggtgaaaacccggatattgccaaccatggcaccatatttcccgttctgcttaatcaacatgatctttaccacctttcaaaattctgcggaatagccgccggagcgggacgaacaccgccacaaagatcaccagagaaattataaatttcatcgtttgccctcctattgacaaagctggatgatttgttttatatttggggtgcggggttgaggccccgcacccctggcctttaccagtcaagcaatttgaggattgccgctgttatcaggccggagatcgtgcccgccagaatgtcggccagcaagtcaacctttctggagggccgcgccgtaggctttcgcctgcggcgttttttcttgcccatatcaaccaccccctttctgattattattatatactcgcgtgagtatcaaaacaagatggaatgttgtacaaatatactcacgcgagtttgtgaaagttatatacttgcgtgagataacaaacggtggtaaaatgccatcaaggaggcgatcgcatggaacagagaaaaggaacagccgcaacgagggcgaaaaacaaatataacgccgaaaattatgatcggctttatccctatgtaaagcgggggaagaaagagaaataccaaagagcggcggaggccgccgggtgtagcctgaacgagtttatggaaaaggcaatggataaactggcggacgaaatcctgggggaataataccgccggggcaatcacatggataattcccctctgtggggcctatattttattctgctgattattaccacgggtttgacgccgatcccgtggtaatatcaagaaaaatgtgggccataaccacaacggaggggcgccggtgaagttttacgagatcaacggaaaaaggaatttgtgcggggacaggatccgggaggccaggcagaaacggaggctttcccagtcagacctatgcaagctgctgcaactgcgggggatcatggtggagcgggatgtgatcagccgcatggagagcgggagcagaattgtgacggactttgaagctgtggccattgcggaggtcctggaggtccccgtgctgtggctgctgggcaaagaataggccggcgtggtagagagaaccacgccggcctattgccatattacagagaaagagaggccgccccatgaaaggatataaacacctgacagagcatgaccggaacaaaattgcaaagatgaaaaaagagggggccaccctgcgggagataggggcggccctccatgtgagcgcggccaccgtatgccgggagataaagcgcgggacatatacatacatgaacgcggattacatcgaggtaaccgagtacatcccggagcggtcacaccagagataccgggccaatatggaagcgaaagggccgggcctgaaaatcggaaatcacagggattatgcggagaaattggaggagctgatcgtggatcaagattttagcccctccgccgccctgcatgaaattgaaaaccacccggagatttacggggattttgggatccgggtatgccgtcaaactctgtattcctatgtggacaagaggatctttgcgcgactgaccaacaaggatctgccctttaaggggtccaggagaaagacgaaaaccaagcacatccaccgcatgaaatccgcctccaagggggacagcatagagaaaaggccggaggaagtcaacacacgccaggagccgggacactgggagatggatctggtggtgtcctgccgcggcggccacaagtgcctcctggtgctgaccgagcgggtaacgcgccaggagattatgcggctgatcccggacaagaccgccggcagcgtggtgcgggccttgaacacaatagagcggaaatatgggaaactgttcccggctgtttttaagtcaatcaccgtggacaatgggtcagagttcgcggactgcgccggcctggagcaatccgtattaaaaaagcgggcgaagcgcacgaaaatgtactactgtcacccatattgtagcagcgaaagaggaagcaacgaaaagcaaaaccagatgatccggcggaagtttccaaaggggacaaactttgataaagtttccccaaaggaggtaaaaatggtggaggactggctgaacagatacccccgcaagatcctgggatggtacagcagcgcggacatgttccgggcactgatcgaggccgtttgaaaatttttttactttttgttacgcttacctattgacatttgcgcaacagcatgatcgggcattgtaaatgaacctccactcagcgcaacatcttcagaataccagccgctgaagcggtaatctgtgacatccggcatctttgccagttccacagtctcaccgtacttgcaggtctgttcacccggcacttccggcgcacccgcagggactgtaccttcatactcatacgtcactgtgtactcgttccggtcgtagtacagcttcagcaccagcgtgccgtcctcggcgatgataccggaggaattcgaacggctttcattataagtgaagccttcgtattccttgatttcagcagtggcagtatctccgacagtaccagagggtgtcaatgtatcagctgcaacgatcgagtagttatcatctttcaaattctgctgatagtactctacccgatagctggccgtggaggacttccactgggcgtacagggtcacatcggtgtttttgatagtgatggcactccccgccgcataaggcgttccggcgccgttcttctcggtgttccacccggtaaactcataccccggccgggtgaacatgttttggagcaccatggcctcgccgccggtgatgtagtacttggggtccgtgaccgtaccgtcggcatcatcggcgttggcaacatacaacacctgatacgtctccaccggcgcttcgggggactccgtcagctccagagactgattcggcttctcatccaccatgtagccgctcagaccggccttgtgttcgcccgtgtcatttgtcacataggtatcggcgtcgctccagctgccgtttacatcgggctggatggggaacgtcaggaccagcttgccgccggaccaagtgacgttgccgttctcagtagtcttcgtcaccgcatggtctgtatagtcaaagccctccacagtgatggtcttgctgtcggcatttaccacaggggtaacgccatcaagcgtctgcagagaatcccaggtatatttgccgtattggtcctgcccagtgaccttcgcatactggaccgtcaccgcatcggaactgcctgtcagcccctccgggaaggtgaagaagtccgacagcgtgtcggacagcaccgtgttcgcgccggccgccaccttggaggtgctcacgttatcggcgatggtgctgaaagcgttttccagctcctcggcatcgtccgccgcgaagtagtagttgccttccgtcacgcgggtgccaagattgcaaaaattccagcttgcttgtccgaaccgatttgttgccgtggcattgggatagttggaagacacaccgttcatgtacttgttgaagttgtcccgtatatcatcgggatccgcatcctcaaacataccgatggtgtacacggtcacgccgttgtttttcaaatcgtgggccagattgacagcggttgctgcgacatcgtcatcaaagtcgttgccgtggttgggctcaccatcggtaaagaccaccacgacctgcttggcgtcctgccgggcgccggtcagcgtcggatcctcgacccaccactcgccgccgtcgtgtctccactgtccgtccaggacgtcctgcgcaagggtcaggccgtagtctacgctggtggcgccggcgggctccagcgcttcgattgcgccggtcagctgctgaacgcccgccgcatcgacggtggtaaagtccttgacgatctgtgtatagttgtaggcataatagtcgtcttggcggtcgtttccgacgctgtccgcgtaggagtcatccgcaaacttgacaatgctgattcggtgggtcacgtcattgtctgcacccgccgcgttttcggccacttgatcaatgaagccgtttacagcgctctgcatggcctccatcttggaagtcgttatctcttggcgcgtgtaaagagtacctgtccaaaggttggcattctggttcctgctggtagtaccgagctgattccagtcccggtaaaccccgctgccggtataatacccgatggaatattgccggttcccccaagaaccatcactttcagcttccacttcgtagtagttgccgtcatcatcgcggaaataatacgtcgtccaccgagacccgttgatgtcgctatacgaccatctctgttcatcagtgggggtatattcccacgtgctctctcccaggtcatcatccatcgacccggagacatccagcaccagcacaatatccagcggtgtggtcttgcttcccttggtcacctcgttggtgacataggcctccagggtcagggaataatttccgtcctcatcatagttgaccgtcttgtccaccacgacgccgtcgttgctctctgtgtggacccggtcgctcccgttgccgccgccagggtcttctgccgccaaggcagcagtgggaaccattgtcagcatcatacagaggaccagaaatgctgacaagatccgtttcttcatcacttctcctccttttatatttcagtgatcttatatgtaaacatccttatggatggaatgaccggttccctccgcccacccggcggccagctgctccgtgtccagcatccgctcgtaggactgctccgccaacaggcgcacgccgcgctccacctccgcccgggtagccagatacagcttccgcaggcaccggggcgttcccttttcctcctctacccgggcgtcatgacacagggtctggatctcctccgtcacctgggtccggctcatgcctttcccgttccgggtgcagaacaccggccccgccgtcaggccctgccgccgggcgtagtccagcagctccccctgcagacaggcgggcaacgggacgtatcgccgctccctgccggtacggaccggcaggcgcccggcccgcacccgctcaacggtcacctgaggcagctcccccacccggatgcccgccagggcgaatattttcaccagcaggtaggtccgctccttttccagtatcctggcagcctgcagcagccgcagatactccacccggctcagttccggctggaggcccttgtccgcctccagctgccccaccaactgcaggtcccgccgccccatgtactccatcagcccgttggcggcagacaggtgggtattcacggtgctgggggaataccctgcctccagcaggaatgctcgccaagcagccagcgttccccgggagatctgcttgtccgggggcaggtagtcatagagggcccgcagcttggcactgtacatctgcaccgtgcccttgcggcgtcccctgccggacaggtccgccagataagcccggatggtctccatgctgagctcggcgccgggccagtccggtgtgcggtgtgtctcccgcggcttcagagcctctggactcctcatctccccgcctcctgtcaacagaatcgccatttcctcctgtaagggaccgaaacagggcctgcagaccaggggcaaatgtgcgcaaaaaagcccgcgcagcctgcgcgggctcaaaaatggcgcaaagacagcagccggacaaaattcgacgcttttccggccattttatgctgcccaaatcggtaaaagctcttgcggctggcggtgctttgtgctagaatttggttactgttaaaatcaattatgtatgtctagttatttttttgcagccatccgcatcggaatggcgattctgtcctatttctaacagatcagccccagccgtgccagagtcccggcgtgctcggtgcccgtggagatcaggtaaatccgggtcgtctcaatactggagtggcccagaacgtccgccagcctggccacgtcccggcagacacggtagaacgtcttggcgaacaggtgccgcagattgtggggaaacaccttgctaggtgccacgcccgccttgtcgcacagcgctttcatctccgcccagatctgccggcgggagatgcctttttcgtttctagtgagaaaaatctcgccggaagcgattttttgtttcctggcgtatttgaggagcttgcggcagagcttgcccggcagcaggatggtccggatcttgcccttcaaggagatttcggcccttccccggtacacggcctccacggtgacatagcgcacctcggacacccggattccggtgccgcaaatggtttccagcagcagcgccagccgttcccggccctgggtgcgggcggtctccagcaggcggaggtactccggcctcgtcagctcccggctgtcgtcccggaacagccgccgctggatgcgcaggggcttcacccgaaacgccggccagcccagaaatacaaggaaccggttgaccgccgccagcttgacgttgatggtggccggcgccagcttcgcctccagcaaggcggccttccaggcccccgccgccgccttggacgccgcccggccgtccagccaggcggtaaaatccgccgcatcccgcaggtatttctcgatggtggcggggctcttttcctcccacaccaggcgctgcctgaacgcctggagctgttctcctgtgatggtatagtcttgcactgcatatcgcctcccgtacaattatcctctatattttaccttccggccggctgtctatgtatccaatggattttgcgcggcagaacactgctctgacaccgacggataggccccggccctctgcttgcattgcgggccgatttgacgtattctttaataaaaaaggcaggtgccaaaaaaagggagggatcgccttggtgcggaccgcaaagcggacgcctctgattcacgccggacgggcttttgtactggccctggcggccggactggtgcttgttggctgcatggagtggagccgccggaaccaggagcgggaccgcatgggctatgtcgccagcgccatcggggcggagacgtatgagtttatgctctccgagatgagcaaaacccgcgttctggaggcctatctcatccagaccagcggggactattcggacttcggcagggtcgcccatgtcctgctgcgggaggactatgtgcgaaacgtcctcttcgcgccggacgggatcgtggacggtgtctttcccctggagggaaacgaggatgtcgtcgggctgaacatgtacggggacggggccggcaatctggaggctcaagctgccatcgaaaaagaggcgctgtatatcgccggccccttccagctgatccagggcggcctgggcatcgccgggcggctgccggtctttctgacggacgaacagggccagcggtatttctggggcattgtctccgtgacgctggactttccggccgccctgtccggaagctccgtggagcgggtaaatgcccagggcttcgcctgccaaatttggcgcatcaatccggacgacggacagaaacaggtgattctcgagacggcggacccgctgccggagggtgtgcggactgtggaccacgcgcaggagctgttcaactctgtctggaccgtctccctggcgcccctgcggccctggtatctccagatcagcctgtggctgggggtggcggtgagcctgctggtggcgttgctggctgcggcgggcgtctactacgcgggccggctgcggcagctgcagctggaaaaatcccagcgggccatccagcagctgcaggagcagctggagcgggaacagggcaatatgctgctgaaccagatccgctcccacttcttttaccacaccctcaacgctctgcaggccctgatcgtcctgaagccggaggcggcctacaaaatggccggagacttcgcccgctacctgcggttcacactggactccgtcactgccgacggcgggatcggctccttccgggaggagatccgggcggtccgggcctatgcggatatcaaccagcagcagctgggggaccggctgcacatggtctacgagattcccgacgtggactttcccatccccctgctgaccatccaacccattgtggagaatgccatcctccacggcatcaagcccaaggtgggcggcggaaccgtctctttgaagctggaagagctgccggaccactggcaggtcacggtgacggacgacggcgtgggcttcggcctggaagctgtccgagagaagggctccatcgggctggagaatgtgcggcggcgcatagcccgcttccccggcagcgagctgcggatcaccagcacagtgggcatgggcacacaggctgtcctgacttatggaaagcgggggaaaaacatggaaaatctttcaaaatcgacctgaaagcgtacggtttccgtacgctccatctggtacaatagaaacatgagacaggggtgaccgcgattgaaaaccattctggtggacgacatgctgctggatctgcagctcttcgagttgaaatgtgcggacatgcctgattttgaaattgtggggaaattcaccgatcccaacgcggccattgagtacgccgccggccatgtggtggattttgccctgctggacatcgacatgccggggatggacggcatccatctggcccaggccctgcggcggctgcggagcgacatcatcatcgtcttcgccacggcccacccgaagtttgcggtggaggcgctgaagatgaaggcggactacatcatcttcaagccctttgaccgggaggacatcgccgatgtgatggagcgggccaagctgctgcgccgccgccagtgcaagcgcatccatttccacaccttcggggccttcgacatgctggtggacggcgagccggtgcacttccgctccggcaaggccaaggagctgatggccctgtgcgtgtatcgggacgggcggccggtgtccattcacgagatcgtggaaaacctatggggagagaacgccgacggcaccggctaccgccgcaccatcaaggagctggcagacaccctgcgggactatggcgcggaggagatgttcctgcgcagccgggggagcctgcgggtgcggatggacctggcggactcggattttcaggcattcatgagcggcgatgaggacgccatctgccagtttcagggggtgttcatgcagcagtattcctgggcggagcccatggtctgcacgctgcaggagaaaaaggagctgatgcttgcccgcatggggaagcaccgcatgtaaggagggggctgaaactttggatgagttactgagaatggagcacgtcagcaaacgcttcggcgatttctacgccaacagggacatcaacctgtccgtccgcaagggcgaggtacataccctgttaggggagaacggcgcgggaaagagcacgctgatgaacgtcctcatcgggctgtaccagcccacagagggaaagatcttcctgaatgggaaggaggtccgcatcgactctcccgcccaggcggtgaagctgggcatcggtatggtgcatcagcacttcatgctggtggaggccatgacggtgttcgagaacatcatcctgggggaccggaacaccaagggcattttcatcgacaaggaggcccggaagaaggaaatcctggatctggcggagcgctatggtctggacgtggagctggaccggcccatcacggagattgccgtgggcgcccagcagcgggtggaaatcctgaaaaccctgtatcggggcgcggagctgctgattctggacgagcccaccgccgccctgacagacatcgaggtagagggactgttccagatcatccataagctgacggaggagggcaaaagcgtcatcttcatcagccacaagatgcgggaggtgctgcagatctccgaccgtatcaccattctgcgcaccggcgaggtcatcaccaccctggatcgctccgagaccgacggccaggagctggccaacctgatgatcggccgggagctggccccctcccactacggcaaggtggaggagccgggcgatcccgtcatccagatgcggagcgtggactaccacaaagaatccaagcacgcagggctcagcggcgtctccctgaccgtgggccggggcgagatcgtgggcattgccggcgtggacggcaacggccagagccagctggcccaggtggtcaccggcgtgctgacgccggacggcggtgaggtggacatgaagggctccaaggtggctcagttcacccccaacggctttattctggaaaatgtatcccacatcccggaggaccggaacaagatgggcctcatcggcaatatgtccgtgaaggacaatatcgtgctcaaggccacggactctccggagttctccagtgccaagggctactttctgaagaaaaaggccatccgggactacgccctgaagatgcaggagaagtacgacatccgctgcacctctgtggagcaggagacgcggaacctctccggcggcaaccagcagaaggtgatcctggcccgggagctggagggcagcccggacctgctggtggccgtccaccccacccggggcctggatatcggcgctacccgcttcgtccacgacaccatgatcgaggcccgggacaagggctgcggcgtattgctgatctccgcggacttcgacgaaatcctggaggtttccgaccgcattgtggtgatgttcgaggggcagatcatgggcgtgttctccggcaaaaatcctcccattgaggagatcagcctggccatggccgggaaataaggagggggagaacgcatgaaaaacagcggaaaactcgtcagtttcctggtacccatcatctccatcctgctggccttcgtcatcgggtgcatcatcatggccgtgctgggtgccaatccctttgtggcgctggagtccctttggatcggtgccttcggcagcctgcggaacgtaggcaccaccctggcccgctccacgccgctgatcttcaccagcctgtgcgcctgctttgcataccgctgcggcgtgttcaacctgggtggtgagggccagttcctgatgggctccatcgtctgctgctacattgccacccagagcgggatcgaaggactgcccgccattctcctgtgtctggtgggcggcgccgtggctggcggcctctggtccctgatttccggcctgctgaaggtctaccgtggccagaatgaaatgattatcaccatcatgctgaactatgtggccacgctgttcatgggcgtggtatataccgactggctgcgggacggcagcgttccgcagacgcaggccgtgccggaggccactcagctcagccgcctcttcggcctgcgggtcacctccgccttcgtcatcgccctggcggtgggactgctggtgtactatttcctgttctacacctccaagggcttccagctgcgggccgtgggcctgaacatgacggcggcggagttcaacggcttcgcggtgaagaagtacatcctgatgagctttatcgtctccggcgccatcgccggcctgggcggtagcgccgagctgctggggacccagttccggctcatcaacggcttcggcaacggctacggattcgacggcgtggccatggccctgatcggtcagctgcatcctctggcgaccattgtggtggccatcttcttcgcagctctgcgggtgggctctaccaccatgcaggcggccaccggcgtgcccaccagcgtatccgacatcatccaggccctggtgatcgtgttcaccgtggcgggtctggccatggtgaagctgcccggattcaaggcgttcctgggaaggctgacggagagacggaaggaggcggcctgatatggaatttgtcatgaacatcatcctctccagcgtccgcatggccacgcccctgatctttctggcgctggcggagctgtactcccagcgggcgggcctggtccacatcggactggagggcctggcctctatcggctctctggtgggctttctggtaagcctcatcaccggcagccccatgctgggcgtgctggctggcgcggcggtgggcattctggtgaacatgatcttcgcctacgctaccgtcaccctctgcgcggagcagatcgtctacggtatggccatcaacatcttcgccccggccctggcggccttcatctaccgggtctacttcggcgccgggtccgagctggtgcaggtgggtctgatgaacacgctgtcctcctccctgggcatcacctccgacaacttcctggtccgcctcctgctggaccagacgcccatggtgtacctggcttacggcctggtgatcttcacggttatctacttcaaccgtaccaagtccggcctgaactacaaggccgtgggcgagtatcccaaggcggcggcaactctgggcatcaacgtcattggcgtgaagtacgccgcctgcgtcatctgcggcgccctggccggcatcggcggtgcctatctcaccacctgctacgccaacacctacgtggacggcaacgtggcgggccggggcttcatcgccctggcggcggtgatcttcggccggtggagcggtgccggcgtgctgctggcgtgcctgttcttcggcttctgcgacgcgctgcagatccggctgcaggtgggcagcttcggcgtgccctatcagttcttccagatgatcccctacatcgccaccgtggtggtattggccggcatcggcatgaagaaggccggccccaagagctccggcaagccctatctcaaggaggagcgctgaggataatcgccgcccacgcggctgttatcaatagaaggcatccacatttatgaagaattgggaggaaagaacatgaaaaaattattggctctgcttctcaccctggtcatgtgcctgtcgctggcggcgtgcggcggctccggtaccgacacctccggcactgacacgtccagcggagaaaccggcgaagactccggcgacagcagctaccgggtggccatgatctgcgactccagcatctccgacggcgggtggggcatgtcctgctacaacgccatggtggatgccgccgcagagcgcggctgggccacggaggtctccgacagcatcgcccagtctgcctactatgacaccatcatctcctattgtgacctgggctatgacctgatctacgcccctggcaaccagtacaccgacgccgtccttcaggcggcggaggagttccccgatgtggccttcgccctgctgaacggcggcgaggacactcccgccaaagccgtcaacggcaatgtgacctccctgctgcccaatgcccagcaggtgggctggatcgccggtgccctggccggtcttatgaccaagagcggcacggtggccttcattggcgccatggaactggataccaccctgggcaagtataacggattcaaggaagccgccgcctatgtgggacagcaggagggcaaaaccgtctccactctggatgtggtctactccggcgacttttccgccgccgacaagggcattgagtttgccaaggccatgatcgaccagggcgctgatgtgttctttggcgacgcctccgctgtggactccggcgcacggcaggccattgacgaagccaatgccgccagcggctccgtgagcatctatgacatcgcccagccctccgatctgttgggccagaacgagtgcatcatcggcagccaggtgacggacaatgcctcccttgtgggcctgtgcatggaggctgtggaggatggctccttcggcggcgaggtcatctacggcaccctgcagaacggtgccttgtccgcgggtgccctcagcgacctggtgcccgccgatgttcaggagaagtatcagggctacctggaccagatggtggacggcagctttatgcagtaagatttatacccgcaaaccactgcggctccatccagatgcctggatggagccgctttcccccctgcccgggaaacttctgcccaacggtagaacggggcctgcagtgccgggcattggatggcgggcagccgctcccctcctccctggcccgcagacgcaaaacggccgtgcgatcaaaaatcgcacggccgtttttccgatattctgccccacaggaacggcgcggtccgccctgttcttcgggtcatcaggagcgggaagctctctcctcccggcagtcttccggttttttcgtgtggtttttataggtattccatgtgggttcatattccgctgtggcctgattgccccacatggcccagccctcccggtccccgcgggcaaacagctcaagaaacggccctggagagcatcgctcgatcagggggatgaattcgtccggttttctggagtgctcccgcttctgtgcccgcagcaggttcacctgggacctggccgggggcagcgtcctgttcccgccgcccctgacaccaaagagcagaatttccgtcacattccggaagtagaaccccacaccccggccgtccggttctccgtccttgcgaaccttctcccagatgatattgcccttgtactcgaatccccaggccttcatgaccgcaaggccgtcgggaagcagggcattgggtacccacagatacagatggctcttctccgccgccacctgtgccaccggcagcgccatgatgtcttccagctccatggtctcgtagcgattcagccgcttgtgctcaggcgctaccttcccggtccgattctggaacctccagggagggtcggcatatatggtggcgtatttttgatcgccgcagaaacgcagcagattttcagatgtttcctggattgtgctcatcgatgtacccttcctcccaatctgtgatgcacggtttcctgatgcctactgccagaatggggcatccgccgttcctgcgggaatccaagcgataggtcaatttccccatccaggtggtgctggccccgtacttccgcagaatgggtttccactggcgggtctttccgtcatagtcgtaaatggttttgaagatgtcgttcagctcggcagagcgcgtaatgatgatccctgcactgacaaggtcgcagtcataatacgtccgcatggccagcaggtcccggtcgaacgtctgatctttgctgttccactccagatcgaaggcgatccggtttttcagaaagtcgatattatgtccgtcgatatacccgggtatgaccttttcctcaaacggctcctgggaaaagcgtccccgctgttcggcctgccgcggatagaacttgatgtggaggtcgccggaaatgcggatctcgcgccatccgcggggatacagcacatcatcaaactttttggggatcttggtctcgtttccgccggactcccgaagatcgtccgtagtgatgcgcagctgacgcaggcagtccacaatctcgctccactccgccggaaatgcctgtgtgataatctcaagcgcgtgattatagctgtaaaattcaaacttctctaaaaggtcgggcgcaatatactctctcaagtccaaggcggctgtcctcctgtgttttagatattataacatcttttcctcccgttttcaccaccattttttgaatgcgccataattttcagggggtgcctcttttttacgtttcaccaatccgggtcccgcagcccccgccgggcagcaaaaatttcggaaagaggacacatgttaacagagcgcagccagttgggtgctgtggcaggatggtacatttccccagagagttttcagaaggggtacgacccaggcattgacgactatatggtgaagcccggcgacttcagcgggctgctcatgcgggtgcgggcactgctgcgccgggccaatattgaggccagccggaagctgtccgtggacggacttcttctgtatgccgacgcgctgacggcctctcttgctggagcggagatccccgtgaccatccgggaattcaacatcctgtacgagctgctgtcctgccccaaccgcaccttcccgctacgggcacaggcggaagttctgtggcagcggcagacacactgaacccgccgtcccgtcacgtcccctgcgtcaattcgcaaaggccatagccggaagtcccgcctctccgctgccgcagcgcaagaggcacccggatggctccccggtgcagagtccgcacacttgattgaaaatggatgcgcgggcggcaaatattgtggtataatatccatactgagatcgctggtggccgccgggccgcggccgctcctttctccggccgcggcccccgccctgtcagggcttttacgggcaaacgtccagcttcccggcgcaccgcagtgtgcagggctggagatcacagcaggtacggcagcctccgccgccccccgtccggccctcccccgatatttttgaaaacggtgcaaacgatcaggaccgtgtcgactgccggagcctaccggagggcggccgcctgctcttgtccggcggcggcgcaacgcgccggagggagctccgccctggctgcctgcaccaccgccggaacggcgtgaagcacggatgtgccatccgggggcacggcgtctccgcagggggcggcatcgagggcgcactgtccaaggggcagtcatcagaaaagaggaatgcgtatgtggattctcttcgcggctggatccgcgcttttcgccggtgtgacggccattctggccaagtgcggcatccggaagaccgactccaccgtggccaccgccatccgcacccttgtggtgctggtttttgcgtggaccatggtgtttgtcgtgggctcccagggggagatccggaacatcggccccacaacgctcctctttctgttgctgtccggcctggctaccggagcctcctggctgtgctacttcaaggccctccagctgggtgacatcaacaaggtggtgcccatcgacaaatccagcaccgtgctcaccatcctgctggccttttttctgctgggggagcccatcggcctgcctcaggggatcggggtggtgctgatcggcacaggcaccttcctgatgctggagaaaaggtcccccgccgccggctgtgcaccccagtgcgggagctggatgctctacgccttcggctcggcggtgtttgccagtctcaccgcgatcctgggcaaagccggcattcagggcgtggagtccaacctgggcaccgccatccgcaccggtgtggtgttggtgatggcctggctcatggtgctggtgacaggcaaggccggtgcggtgcggcaggtgccccggcgggagttggcgttcatctgcctgtccggcgtggccaccggggcctcctggctgtgctattaccgggcgcttcagagcggccccgccagcgtggtggtgcccatcgacaagttgagcattttggtcacagtggccttttcccggctggtgtttcgggagaggctcacatctcgctccgccgcaggtcttgccctcattgtggccgggacgctggccatgctgttctgaccgccggagccatccccctccagcggggttctcttcgcgcccacccgatgccggacaggtgttcctttcggcgggccgccagctggcggccgggggaaaatttccactcttgtttttttctgtacagcgtgctatactggccgaggtttaaggaatgcggcgaaagggggagctccctggcgccacgctcacatagatgacaagaaccagattgcgagggagcctgtgttccaggctgagagggtcccagtaagggccgaccgcacccggcttcccaggcggaagcgggggcatcagcatctgcgtgaaggtctgaacgggtatgtgctgatgaggcgcgtgcccgttttgttttgcgcagaaaattaaactggagggattcccatgaaaaagaagatttccgcacttttgttgagcctggcgctgtgcgccggactcctggccggctgcggcaccggggagacggcggaggctccgtccgacaccgatgtacagcaggtggactctctgaaaatcgcattttctccctatgcggacgccgacctcatctccgagtccacggagccgctggaggagctgctgaaggcaaagctgctggaaaagggctacgacgtgggcgagatcgacatgaccgtgggcaccagctacaccgccgtgggcgaggccctcagcgcgggcagcgcggacctgggcttcatctccggcggcaactatgtgctcttctccgacgactgcgatgtgctgctgaccgccctgcgctatgccatcaacaaggactctgagaaccccgccgactggaacgacggcaccatcgaggagaacacagaggacatgagcacttactaccgctgtatcctgctggccggtcccagcgagaagggccaggagctgctctccaaggtcaacgccggggaggagctgacctgggacgacctgaacagcgccacctgggcggtgctgaatcccacctccgcctccgggtacatctatccctccctgtggctgcaggagcactacggtaaggggatcagcgatctggacaatgtggtggagtgcgactcccacaccacctccgtggcccggctggctgccggtcaggtggatgtgatggtgtcctacggccacatccgcatcaagaacgcccccatctgggaatccgatttcggcggcacagccccatggtggagcagaccggcgtgatcggtgtgacggacggcatctacaacgacatgatcgcgtacagcaagacctctgacaccatggcggacgaagccttccggcaggcagtgggcgagtccttcatcgagctggcccagaccgaggagggccaggagatcttcggcgtattcagccaggtgggctacgactggggtagcgactccgactatgacggagagcgggcggcccaggcgcttttgaaatctatggaagcgtgaccatcttcaggagggatttcatgctgcaggcgatccatatccgcaaacaatttcagcgttccggcgaggtgctgcgggatgtcagcttcaccctgggcgacggcgagtttctctcggtcatcggcccgtccggcgccgggaaaaccaccctgttccgcatcctgaatggaacggagctgtgcagcggcggtgaagtcctctatggcgggacgcactttgaagccgcccgaggccgggaaaagcgggcgctccagcaggggatcggcaccatctatcaggatttctgcctggtggagaacctgtccgccatccagaacgtgctgaacgcctgcctgccggacatgtccctggccgcctccctgctgggggcgttcggacgggagcggtccgaacaggccgccgcgatcctgcgagaggtcgggctggcggacaagctggaggagccggtgaaaaacctctccggcgggcagaagcagcgggtggccatcgcccgcgccctgatgcggaacccctccatcctgctggcggacgagccggtggcgtccctggaccccgtcaccgggcggcaaatcctgtgcctgctccgggacattcagcgccaacgcggtgtcagcatcctgatgaacagccacaatctggacctgtccctggagttctccacccatatcgtcggcatgaaccggggacgcgttgtctttgacggcgcccccggggatgtgacggaggccgtcctgcgggatatttacggcgaggcggcggccgtatgaaacaaagacgtatccgctgcctcgctgcggccgcttttgtgctgctgttcctgggagccgcctggttcaccggatgcgacctgtccctgatgtggagccggcgcgaccacctgacggacatcgccgcaaagatgtttccgccggactggggattcctcgggaaggtcctgcccctgctgtgggccacgatccagatgtccattaccgggacgtttctgggcgcggtgctgtccatcccggccgccatggcctgcgccgccgccctgccgggacccggcccggtcaagaaggcggtccgcttctgcatccaggtgctccgctccttcccggccctgatcctggccctgctggccacattctttctgggcatcggctcctttgccggaacggccgccatcacggtctacacctttgccatcatgacccgcctgacctatgaggacatcgagagcgcgccccagggtccctatctggccctgcgggctatgggcgccgcctcagcccaggcgttcttccgctccaccttaccggagatcctgccggcctatctcaccaacgccctctatctgctggagggcaatgtgcggcacagcgccatcctgggctatgtgggcgcaggcggaatcggcctgctgctcaatgaaaaggtctcctggcgggagtacgacaaggtggggacgatcctgctgctcctcttcgccgtggtctatctcatggagcatctcagcacatggctcacccgtctggtgcagcaggagcggaccctgggccggcaggggcgccggctgctggcgggcgcggcggccgcgctggtattgttctgcacggtcacgcttccgccgcccgacctgtcccgcacaagcatgcagatggtgaagacgctcttcaccggcctcctgcatccgaactgggagctgtttttccgcctggacagcagcggacttgcctatctcctgctggagaccgtcgccatcgcgctggtggggacctgcgtcggcgccgtcttttccgttcctctggcgtttctcggcagcagccgctttttcccggcccccgccgcctggctgttccggacactggtgaccgccatccggtccgttcccttcctgatctatggactgatcttcatccgcgtctgcggccccggctcctttaccggagtgctgaccctggcagtgtgcagcgtgggacttctctgcaagcgcttcacagaggccatcgacaccttggattttcgggcgtatcacgctctggaggccatggggacgccgaagctgtcctgcgtccgccacgcggctctgccgcagctggtgcctcagttcttctccgcctggctctatcggtttgacgtcaatatccgcgaggcctccgcccttggcctggccggtgcgggcggaatcggcgcgccgctgatcctggccctgaaccaatacgcctggcatgatgtcagcactctggcgctgggcatgatcgccttgtcctggctggtggatctggtctccgctttctgccgccgcagggacgcctgaggccgatgcccgccagcagccggatccggtgcagccccccgttccgccccggcgggaaggattccggcggagctgctgcaaagcaagacacggacagtctttggactgtccgtgccttgcgattccccggccgggggccgctcagagtgcttcgtattccgcgtcgctcaccggctcgcaccactcgttggagcaggcctcaccgggcatctcgacggcgatgtggctgaaccagctgtcccgcttggcgccgtgccagtgcttgacctccgccgggatgacgatgactctgccgggctccaggctgaccgcctctttgccctcctcctggtaccaaccctcgccggcggtgcagatcagcagctgcccgccgccctcggaggcgtggtggatatgccagttgttccggcacccgggctcgaaggtgacgttggccagaaacagcccgtcctccgggcgggtcaggggattgagataggaccggccggcaaagtaccgggcaaaagcgtcgttgggcgcgcccaggccaaacacgttctgttcctcaaatgcagccttgtccatgatcttcatgcaacatacctcccaatgctttcttatgaatgcggggcagaccgccgccccggtgtggatgttctgccgccagcgtgtctcctgccgctcacgggtgtgaatatccgccagcgcggcggcccgtatctccaccagtagccgcagccgcatatagccccccgtctcctctccggtgaagccgatgtcccgaagcgtcaggatcaggttcagccgctccgggtcgcggcctgcccgacctcaggacctccatggagatctgatcgcactcgctggcctcctggatcgtcatcgcccgcacctcagggcagaaagtggagacgtccccgcagggacgcctccattctaaatctggaacttcgccttgtccaatgcctataccggatggtctgatattccgccgacgtatttctcggcaaatcgcagcagggcagcagcggtggcagaaaggacctcggtcttcttccaggccagaaccgtgcccgactccagcggcggagagaggggtacgaaccgcagcccgtcataggcgcaatccagccggatcaccagatagatccccagcccctcccgggccagctgggtctggttgtaaggcaggttgccgctggccgccacctggatccggtctgcgtaagggccgaaccagcggatcatttcccggcgcatcagctcccgggtggtcaggatcagggggctgtccgccaggtccccgggcgtcaccgcctcccgccgggccaggggcgaatcctccggcaccaggacgccccaggattcccggacgggcagccggaggatctggtagcggctggtgtccaccggctccagcagaagtcccatgtccaggagtccctgctcgatccgctccttgatcccgtcggagtctccgctgtaaatctcatactggacccggggatgctggcggtgaaaggcagccaggagctttgccagatacgtcatgctccgcaggtcgccgcttccgatggagatccggcctgtgacctcctccgccggtcggagctcccgggccgtcttctccgccagctctacgatctcctgagcccggcggcgcagcagcatcccggcctccgtcagaacgatgtggtgctggctgcggcggaacagcttgactcccagctcctcctccagctgcatcagctggcgggacagggtgggctgcgtcagatggagcagcgccgccgcccgggtgatgttctcctcccgggccacagtcaaaaaatacttcagcgtccgaaattccaccgggccgcacctcctcttctcccctaccatatcatggccgcagtggggccgcaagtgtgatatgtgtgaaatgtatgtctcagcatagaaaacatgtattcgctatttctcatttcaggcggtataatagggtcatgtgaggcgcggcgtccggactccggctgccgcagagctgcaacaggaaaggatggtttcgacctatggaataccgtgtcaaccgccgcaccggggaccggatcagcgtcctgggcgtgggcaccagcggcctccccgccgccggggcgaaagagggtgccgccacgctggagatggccctggagcaggggatcaactacttcgacctggccactgccgactccgcctgcttccccatcttcggcgccgcccttgcgggtgtgcgcaggcaggtgctctaccaggtccacttcggcgccaattacgccgccggtaaaccttacagctggaccacggatctggagaccgtcaagcggtcggtagcgtggcagctggagcagctgcggacggactacatcgactacggcttcatccactgtatggacgagtccggcgactggcgccggtatgtggacaacggcgttcttcagtttctggaggcgctgaaagcccagggcgtcgtccgccacatcggcctctccacccatacgccggccctggcccgggaggtgctggacaccggcctggcggacatgatgatgttcagcatcaaccccagctacgactatcagcacggcgagtatgccaacggcagcgccacggagcggatggccctttaccgccggtgcgaggcggagggcgtgggcatctccgtgatgaaggcctttgccggcggacagctgctggatgctcgtacctctcccttcggtcaggccctgacggaatatcaatgcatccagtacgccctggacaagcccggcgtcctgacggtgctgcccggtgtccgagaccgggcggatctggaacgggtcctgggctttctgcgggctggggaggcggagcgggactactccgtcatcagctccctcacccccagagacgcggagggcgcctgcgtctactgcaaccactgccagccctgccccgccggcctggacgtgggcctcatcaacaagtattatgacttggcccgtgcgggggatgccttggcggcagagcactaccggagcctgtctctgggtgcggatgcctgcatcagctgcggccactgtgaccgccggtgccccttccatgtatcccagtcggcgcggatgcgggagatcgcatcctacttccggcaggcgtgagggccctggccgttccttgcacctttgccggctacatcaatgagtggctgactgctgacatccccaccgtcctccgctccgccaccgccctggtgcccctgaagatggagacgcccgtccccttcaccggcacctggacggatgcggaggcctgtctgaaggaattctactgagtgcccttcacgtatccatctcccaaaatcaccaagacggctgccaacccggcagccgtctttttttcgttgattcccgcctcccccggaggtgcgccggaatcagaactgtttcagttatctccgataggatagggcgggggtgcgcgctcccgttttcacgggtgtccccgcggccggagccgccggcggacggtcagtcgtcacgtgcctcgtccgccggcttctcccgcggggtctgctgttcctttttcagggattccagtcccagccggatcaattccacggtcgcctccgaacgggtctggaaccggcgctcaaagcggaaatcctcgatctgctgaaacagctcattgtccacggataccgtgtaacgcggtctgtctgttgccatccttatcacctctggccctattatacacgagtgaaccaccggtgtaaagagagccgcagcccccttgacttcggttcagtgaaccactataataactttaataggttcaccaattcacttaaccactatatggaaaggagctgcgtacatgaacagagatcaaaaacggtttaccatctccgtgacgccggagctggcggcggaactgaccgcggtaaagcagagcagctaccccggcgtcccccgggacgcgatgttccgggacctaatcatccggggccttgcggcgtgggagaagcagtccggcaagaatagccagcccgtgtgacgggtggggtgccgggccccatcgaagctccttcggctctcccggcaaacggcggcagacagaaacagacagaaacacggtgaaagtcagaggcggcaggtacgcccggtgcgggcacccgtgggcagctgcccgcacccgccatcccatggagacagcagaacaattctgggcgttcctgaccgggagcgtccaaagcggtgcagggttcagtccgtatgtcatacggtcgtaacccgccgttcatcgctccccctgaccgggaggagacggaacgtgagcaaagtaaccatgagacggccggatgcccgggccatggcccagcttctggcggagcagacgcagacggcggcggggctgatcctccgcctggcctggcggcaggggctgacccgggaggagatccagcgcctcacttggaacgatgtggacttttctgcccatcagctccggctgccggaccggaccatcccgctggagacggagaccgaggactgcctgcgccggcaggcggagcgccccgacccgcctactcccttcgtggtggtctcggaccgccgcaggcagcagatgccgccggagtccatttcccgcctggccagaaaaactctggaccgggcggggctgggcggcatcagcctgatggatctgcggcacgacttcatcatccgccatctggaatcccacgactggccctatgtggcccggatcagcggcatcgccgtccccactctgtatgccgttttctccgactatctgccggagggacggcagaaggactccctccctcggcaggaggtggacggttttttgatgtggaagctgctccaggcggagggcagctccccggtggggcttgccctttggatgggttggaagctggggatgcaggtccgggagatgacagccctgacctgggaccaggtggatctggaccggggtctggtgcggctgccggaccgggacctggccctgggcgtcaccctgcggcgcctgctgcgggcggcggcgggacgccggcggccgggtgaggacccgcacgtgctgctgacgcccaactcccggcggcccttggaccagccccggctgtccaagatggtgcggaccgccctgatccggggcgggatggagcacatcagcctgggagatctctgccgggaggagcgccgggagaacgaggacgcccggctgctggcctacgccgccgaaaaaggcaccatctcccggtcggaggccatgtcgctgctcggcctgtccaaggtggcggcctacgagcgtctccggcagctggctgagcggggaaagctggtgcgggtcggcggcaaatactaccccgccggccaggtggtgccgccggaggagcagtatgacgtcatccgtacatttctggagcagtccggtccggcctaccggcaggatctggcggcgctcctgcacgtcggcgacagacagtgtgccctgatcctcaagcacatggtggaggacgggcgcctggtgcaggccgggcagcggtacgcccttcccattcgtgaggaggttctgctgtgaacggcgcaaaaggagagcggccctcaggggccgctctcttttttggcccgcgccgcggccggagcagaaatcgcgtccgtgttatgatggcgtgacatggctgtccatgcgatttgtgcgccgtttttcaattggattaaaaggtttgcgaaacgctggacaccggcagttttttcccgtaaattggccttgcgaacggcggaagcgccccgcatccggctctgcggttggtgtaggccgacacaagttggttggctagcccccacacgaatcccagacccgcctggggtcttccggcggaccgcaaattttttgaaggaggagaaatcccaatgaagaagttcctttctctggtgcttgctctggtgatgaccatgtctctggtcaccgtcagcgccggcgccaaggacttcacggacgacagcgagatcacctacaaagaagctgtggatgtgatctctgccctgggtgttgtcgacggttattccgacggcgacttccgtcccgatgatgtcctgacccgtggcgcggccgccaagatcatctgcaacctgatcctgggccccaccaccgcctccgcgctcagcgcaggcaccgctccctttaaggatgttcccgtgaccaacaccttcgcgggctacatcacctactgctctcagcagggtatcatcagcggctatgctgacggcaccttccgtcccaccggcaccctgagcggcaacgcgttcatgaagatgctgctgggcgctctgggctatgacagctccatcgagggctacaccggcgccaactggcaggtcagcgtcatcaagcaggccagcggcatcggtctggacgacggcaacgacgagttcgtgggctcccaggctgtgacccgtcaggaggccgccctgtacgccttcaacatgctgcaggccaccatggtcgagtatgacaagaaggacaccatcgttgtgggcgacatcaccatcaacaccacttccacccgcaaggacgtggaaaacaataccaacaccgacggcaacatcgatggcgagcgcaacggcgacggcctgatgcagttcggcgagaagtatttcaaggacctggagaaggaggatgccaccgacatcttcggccatccctccagcaagtgggtctatgatggcgacgatgtgggcacctatgccaacgaggctgacgccacttatgtggtggaggacgacgatatggacgtcggccaggtggtcaccagctccagctacatgaattacagcagctccgaagccaaggatgccaagtacttcctgaacggcgatgacaatgaggtgaagtcctctgagctggttgccgtgggcgatatcgtcgaggcttacgagaatgacaacggcgatgtggagaccgttgtggtttcccgctacactgttgccaagatcgacaaggtcgataccgacgtcagcaccgctgagagccgcaacggcgcctccgaggtcctgaccctcaccgatctggacggcgacaacagcaacgactactacgacaagtacgacgatgccgagaagaccctgcggggctatgcctcctcctatgacgagggcactgttctggccgtggccttccgcgacggcaagttcggcgatgaagtcctggcttcttacgaggccgaggctgtcaccggcgaagtcaccgctttccgtgaggacgagaccgtcaccatggacggcaccaagtatgagtttgcccgcaacgagaacggcaccgctggtttcgtggacggcatcaccagcaacttcgacttcgacaaggagtacaccatctacctgaccgccgacggctatgtcatcggtgtggagggtgccgctggtgcggacctgaacgacgtgtactatgtgaccggcgtttactgcgaggagagccgttacaatgccaacaagtttacctggtacgcccaggccgtgtccctggcggatggttctgcctctgacatcgagctggatgaaactgatgcggacaatgcactgaaggctttcattaatgatgaaaagacagatgagtttactgttgtcaatggcctgtatacctttgatgatgacattgccactgcttgggacggggacagagactataccgtctatggcttcagtgatagtggtgagctgaacaccaatttgaaggatgctctggctatggacgacaccaagttctccaccaccatcgtcggcggcggtagcggcaagaccttctatgtggacgagaacactcagtacctcggcgtggatgattatgccgatgatatcgacaccgtctatgccatgggcggcatgaagggtacaccgagcaacggaagccgtgtgatcgtgattgctgaccaggatgagaaccgtgacgccctgtatgtgatcctgctcggctccgacgcttccgttggctccgccgacatcctgtacgccgccggcagcagcaccgacaaggtgggcaccgacaagtacgtccgcgagttctggtccatggaggacaacaccagcgaggacatcaccatcgatgaaaagctgagtgcccatggcttctatgaggtggacagcatcgacgaggacggcgtctacacgctgaaggactatgacaagaccgcttcttctatcgatgaggattccgacggcatcgtcgtagaggatctggcgctggacaacacggaccagatctatcgcaacgctctgagcggctccatcgataacgtcaagttcgacgatgtcagcatcgccaacgccaccatcatcgatggccgcagcaactccgaccggaacgactccgtgtatgaccgcgagatcaacagcatctcccgtctggaggccgctctggatgccgtgagagacgaggatctggagaccaagggcactgtggagatcgatctgtacgtgaaggacggcgagatcaccttcatctgcgtcaccgacgtgggcggcgttgccaaagatgacggtgagcaggaaagcggcgagctggacctgaccggtgtggagaatttcgtctgcaacagcaatatcgttactgttgacctggtcggcaccggaaagattcccgctaactatcctgttactgtgactctgatgaaggccaacagcaccgagggcgatgcggaagtcggctccaaggagcatgtaaacgagactgcctatgaggttaatgattggaacaacctgggacaaatcgcgatccaggaaagtggtaattactatgtaattatcaccatcgaaaatgaagacggcagagttgtggatgagttcacttccaacactgtccgcttcgtctacactgcccagccgtaaggcaaatagtttctttcaagtaacttgttgcgcaagaaagcccccgctcgtaagagcgggggctttccctgtttccatcacatccaggccagtagtgctgaacaacgtcggcatcgttcccccctgactggccggtgcctcgtggttgatgaaaaatccatcgtcctccagccccgcgtattggcccgcagctttcaaaaaggtctctccaggagttgaaggagatcctgtctgctcagataacttttccctcttccccatgggtgccggtcttccggcgctcatttttttgtaaaatacagccagattcaagacaaaagtaaaaaaatatattatgatagattgaaaggggggttccaaattctggaagacaggctgcgcagcttccccacgcaatggaagatgtcgaattttctgagagatgtcgttttttcaggctttgctgtttttcgtcgtacaatcttctcatcgcaaatttcgaggaggtgctctccatggacacgatcatccgggaaacgctgcgcccctttggcattacgcgcaattaccgcggttacccgcagacggtccgcgccattgctctggtcctggaagacgaatcccgcctgctcaatgtcaccgaagagatctatgaagtcgtggccctgcagacccggtgccatccctccaacgtggagcggaacatccggactgtcgttctctgcgcgtggcatacaaaccgaccgcttctggtcaaaatggcgggatttacgctgacggctccgccccgcgcctcccagtttattgatatcattgcctcctacatccagcgggaagttttgagtgaccccaaccgccgtgtgctgatctgatgcccctcgcctgtctgttccgggatttggtaccgacggcccatctgcggcccccgtgcggcagggattcccgcatctgctgataaggtgggattcccgctctttactggcggcctgccggagcagccgccaaatcgcccgctcccctctccccggccaacgaatccggcacaggcggccgccctattccgcggggcggccgcctgtcagtctctcactctatttctggccggtgatcagcgccagccgggtctccacggtgtccagctgcttcttcacattgcccacgatatccgcacccacgatgtttccctcgctgtccacgatatatgtagtgggataggtggaaatatccgcaacgaagtccttgtagaaatcgccctccggatccggagagatattgtgataggtcacgcccttttccttcaaaatctcccgggccgtgtccagctgctcccggctctcgccggagtcggtacccacaccgatgaggttgatgtttcgctctttgaaatcctgatacagctcctccagttcaggcatctcggcgatgcaggaaccgcagccattgttccagaaattgacgatggtggcgtcatagtcggcgaaaatgtcgctggagatctcatcgcccgcaatgtccacctcggaaaattccgggaaaggtgtcttggacaccagggcgtcctcttcaccggagctgcagccggtcaatgcggcggtcatcagtaccgccgacagcaataggatcagaacacgtttcatgtggcagtctccttcttctcttgtattcttttgatcgaaaataccctggtgatggccccatgggggcaggcagccgcacagtccccgcagcggatgcactcagcatggttgggcgtcctgaacacatccacatccatcctgcacgcacgactgcacgccccgcaggcggtgcaccggcccgagtccacctgcaggcggcagatggaaattctgttgcacagcccgtaaaaggcccccagcgggcacagccacttgcagaaaggccggtagaaaaacaccgccagcagagctgtccccagcaggatgcagctcttccaggtaaatagtccgcccaggccggcccggatgcccgcatcggccagcgccagcgggatgccgccctccaggatgccggcggggcagatatacttgcagaagaacgggtcgcccattcccacctcgttgaccaccgtcataggcaggacaatgacgaagagcgccagaatcccgtatttcagataggtcaagatgcggacccgcctggtgctgaacttttttgcagggattttgtgaagcagctcctggaaccatccgaacgggcacagaaagccgcacaccacccgccccagcagcgcgcctgcgaaaatgaggaatcccaccacataccatgcaaactggaacttggaggagccgatcaccgcctgaagcgccccgatggggcacgaagctgccgcggccggacaggagtagcaattcagcccggggacgcagacggccttcaggccggtcctggagatccttccatgcaggaagttcatcaaaaaggggttggaagccagcgcggcccccagctggatcttccagcgatgcttgttttcagccaatgcccacacactccaaacacaggttgacgcccttgtgcaggaccatgtccgcttccccgcgccacagccccagtccaatcatcagcagggcggctgccagacaacagatcgtgatctttctcatatcagcccatagccgccatagcggcgccgccctctgccgccgtcccagactggaacgcggcgttccggctcatctccacaaaggcggccgcggacgcaggcagctcctctgcgtccacggcggaataccatgcagagaggaatgttccgttcacataccaggaggcgacgtttggcatctccccgtcctccaccatgcttctgttgctgcccacagctgctgccagagagtcgttgtagaggatgacggggaagggtgcatcggcaaacatctcgctgccggttccgcttttggtgcaaaccaggatttccgccccattctccgcaacgcccccatatccctccgccagtgcgttatagaagacctgcgtcccctccgcttccggatccaggaaggcaaagaacaccacatccccaagctgttcccgggtaaacgcctctccggacagggtggtcgtggcaaagtcgcccaccatgttgctctctgttttgctggcggcgggaacgctgttctcctcataataggcatccacccacgcctgatcgacccagcccttatccagggcgtcctcgatggtaagcgtaccagcctcgatggattgttccacatcctcctgactgggccgcttctctccgcaggccgccagggacagggccatggcagcggccagacccagcacggccagcttccgtttgttcttgcatcgcttcataaaaaacctccttgccgcacctgcggcggattttggacaggaggcattgtagcatggaaaacgtaaatttcctgtcaaggcggtcttgatggaaattttatctggatgtgctataatagccgcacatggaaaagggcggtgagtgggatgcggattttggtggtggaggatgagcgtctcctgtgcgacgggatcgcggaggatctgagactggaaaaatacacggtggattgctgctacgatggtccggcggcctgtgagcggctgtttgtggaaccctatgatctggtggtcctggatctgaacctgccaggcatggatgggctggagctgctccggcacatccggacggaacagccggagctgcgggtgctgattctttccgcccggtcacagctctcagacaaggtggcagggctggatctgggcgcggacgattacctgaccaagccgttcgccctggaggaattggaggcccgggtgcggacgctgctgcgccgggaatttcgtcagcgggagtcccttgtacaggtgggcgcgctgaccctaaacaccgtgacccgggaggtctccggccgtggggaaccccttcccctgacgccccgggaatttgccatcctggagcatctgatgcttcaccggggatgctggatcagccaggaggagctgatggagcatatctgggaggcggatgccaaccccttcagcaacgccgtgcggatgcacatctcctcgctccggaaaaaactgcggaagcggctgggccatgatccgatccagaccaaggtaggtcggggctatcgcctggccggagaggagacggcatgaggaaaccgatgtccctgcgcctgcgggtcactctgctctgcgcagccctgctgacgctctgctgcctcctgctcactgtgactaacaatttttcggccatccggatggccgacgccattcaggcggtgccgcttcttccggcgcagcgcgcagagctggaagacagtgtcagcctgcccatggcggaactgcatatcagcgatacgatccagcaggctcagggggcgttccacatgcagagcctgctggccatggttgccatcctggcgttgggcctgttcctcatataccggctggttggaaaagcccttgctccgttggacacactcacttgccggatccgggagcggacggctgcggatctggcgcagcccgttgagatccccgacagcggggatgaggcggccgcagtggccctggcgttcaatcagatgtcccagcggctgaaccaggtcttcgtcatgcagaggaacttctcccgcaacgcggcccatgaattccgcacaccgctggcagtcctaaagacccgaatcggcctgttccgcaaaaagcaggacttccgcccccaggccacactggagctgctccagatcgtcgagggggaggtggaccgcttgtccgccatggtgagcgaactcttggagctgaccaatctggagcgggcatcccgcggagagcggctctcctccggccagctgatccggagcgccgcggaccaggccgccccccaggcggaagcgcggagcatcaccattttggtggatgccgcgccctgtaccctggccggaaatgcagagctgctccggcaggcggtatgcaatctggtggaaaatgccgtcaagtacagcccggccggcagcgttgtacacatcgcgggccaccgggatggggaatggttccaaatcgtggttgccgaccagggacccggcatcccggaatcgctccgccagcggattttcgagccctttttccgggtggatgattcccgctcccgacagctgggcggtgccggacttggactggcactggtgcgggccatcgcggagttccacggcggcgctgtttatgtggaaaaatcccggggagcgggaagccgattcgtcctgaagctgccatgcgaacaggatcctccgccggattgagatccaaactgacgtcttttgtcagacgggatcggcggaaacgcctcgcggcagttattttcatgcccctggctgtgggcaagctgcctttccgtgcgccgccccctggggctcagcttttgggcggaagacgctctgcggagggaaccgccgtccggaagcctgccaccgacacgtggcggggcagtctgcgtacaacgtttgaagatatcagcgtctctgcaaacgcaattcccgttgcctctccatacagccctgtaatctgtgcgccacttacagcaggaaagcacctgaaatctaaagatttcaggtgctttttgcttctcagcggacagtgcgcatctgttttgggcttcgcacatcaagtttcctgcggatagcagcagcgaagcccgcatgacgcccgcatctctccaggaaaaatgtgcttccggcacacgcaattctccaatcggccccttaataaatgctgacagttcgaaaggatgtatacctccagatccgtcagttggtctgccgggctgttttccccgtgatgggctcctgacttatgattgatgcggcccatgacgatctttgccatgccgctgacccttgcgtattccgcgatctgcaccgcaggagccgtcccgtacaccatggaaatctgcgccccctgctgctccgccaagtgcagattgcagcgcagttgctttatattccctgtggtaaagaaattttgcaggacctgtttggtctggcgtttccgacagacttttcccacccgaagaagcctctccacatcccgatgcttggtatgccggcacccctgggtgttgttgtgcgccgcttcatccaccaggacagttggaatctggtcaatatcaaccctcccggagttgaatgccgcggtattcgtttttcttattcagcaagacctcccgtccgttcagcagggacaatgtatccggtcttacatgcggggctccacatagcccaccaccagatcagcgccctctttctgcgcctgatgcgccgcttacgacagggcatacgttttgctcacgccggccgcatagccaaaaaggatttttagcctccccggaggatcctccgcttccggatcgtgtgggaaattcgcgcattcattgtttgtccgtcccctatgtactcaccctcccacaactcgtcatagaatcaataccttgtcccgttatcgtatcacgcgtaatactaccaaaccgtgaataatggcgtcatgatcggaagatagaattggggcgctcccaccagcaggaaaacgagcgccagaatcatttggcgctcgtttcataactgtgtgtatcgtcccatcccaaaatccgtttggccatcagatagattcccggcttgtaaaggaccagaaccacatccaaggcaggactccggcgtataaagtccgtaatcgcttggccggcaatatagattgcttcttctcgtgggatgtgatattctcccgaaaaaataagtggaaacgcaatgcttttgcatccgctggtcactgcccttgtcatggcgcggcggtagcagtctgccagcagtaaccgctctcgctccgcgcctccaaaccagccaggtccggccacgtgaataatatagcgggccggcagcccaaaggacggcgtcatcacagaatgtccgataggacaatggccatgacgtcggcaagcctcctccagctttgcactatccgctgcggcgaaaattgcctcacagatccccggcgtacgcttcagttctgtgtttgcagcatttacaatggcatccgtggcaatatttacgatatttcccatccaaagatgatacggcataggtcttcctcctttacagcagagcaccgcataccagataccccaaagcggaaattccgctggcacacagcgcatacggaatctgagacaacgcatgatccatgttctcgatcttacagcagctggatgtcaataccgtggcatcggaatagaagcaggcatggctgccgagcgtggcgcccgagacaatcgcccccatgaccaggagcagatttgtgccgatgctctccgccagcggcagcaggattggcgcaacgatggccggaatcccccacacgctgcctgtactgaaattcaggatcgccaccaccagaaatgtcaccagagggaagatcacggcattgacatggggctgcaccagggtaatgatgtaatcggcaatcccgatatcggtcattgcctcctgcatgacaaacgcaaagaagatgatggccaccgtgggaatcatgttgcaaaagccgtgcatcgccagatcacagaacctggaaaagctcattttgcctctgggaatatagagtacaaagcacactgcaatcgcagcaaccacggccagaaacagctctccggaaatgattgccaagataatcaacacgcccaccggcaggataaagtccatgaggctgccctgtgtctgaaattccgactcatcctcctcgttgagcggtgcgctctccggcgaatagaccttgccggtctcctgaaggcggcggtaagcggtccgcatccgccccagcttgggaacaacgccaacgataaacagcggcacgatgataaccgctgcgatggcgtaaaaggcaaaggggatcacgtgatagaatgtctctatcgccgttccatagcccagctccgcaatccccggctgcgtgaaaaatagcccggaaaagaagattgcccaggtagagaacggcagaatggcacacaccggcgcgccggtggaatcgatgatgtaagacagggcctcccggggcacacggcgttggtcggtcagttttttcatgcaggtgctcagtgtcatgatattcaaatagtcatccacaaaaataagaatccccatgatccaggtgaccatcatggtggaccttggcccccggcagagctttccaagcgcccttgtaaatcccagtgttccatgggattctcccaacagcgtaatgaggctgccgaacaacgcgcacaccaaaaagacccattggtgcgaataatctgtcgccacgcggaaaaaagcatccatccagtcggtggcgatgtgagacagtgcatacactccctcggacgggatccgtgcagcgctggtaatcacataggtcagcagagttccaaagatcaacggttccagagtccgctttgttttcagcgcaaaggcaatgacgaacaggacggggatcagtgtccatattccatattccatgagtacaacctcgtttctaccacagtcgcatttattggagtgcttctggtgcccgctaaagtcataatagagcacttccgatgaagatagtgttagtttcccggctctgggataaggaatatattaagaacaccatttgattgaaatgacaaaatgataggccggcattccagtcgatggaatgccggcctctactgtacagcggatattcctttccgggcattttctgagtccggaatgtcccctgcgcaattcatcagctgccagtttatttgccacgctccagatagtctgccgcaaactgcgcatacagtgcggcccccctctgcagcaccggctcatggactgtatagcggtcgttgtggttccccaccgtcataccgagttcctcatttctcgttccaagaaaaccgaacaccgctggaatcttatcggcaaagaaagcaaaatcctcactgcccatcatctggggaagttctttcaaacacgcttccccatagagtttcacagctgcgtcatgggcgattttattcaactcttcatcatcgttataaagagagtttgcatagtaatcatattcaaccgtggcagtcgcgccaaaagccttggctgtgttttcagcaatccgccgcagccccgcttcaatcttcatacggaattctgcgttataagtccgggtggttccaaacagttccgcatggtttgcaataatattataccgctgtccggcgtgcatctctccgatatttactaccagcgggtttaaggggtcgttcgttctggagacaaatgactggatattgctgacaatcgctgcggcagccaaaagtgcgtccacacccagatgcggctgtgtcccatgggcggaaacgccatctaccttgattacaaagttatccacactggccatgcggggccccgcctgcacattgatgtatggctcctccagtgtcgcccacacgtgctggcccataatggcatccacgccatcaaggatacccgcttcaacatagtattccgcaccgtggcaggtctcctccgcagcctggaaaatcagtttgacgttgccttgcaattcgtctttcgtctccatcagcatctttgccgcaccgagaagcatggagatatggcagtcatggccgcaggcatgcatgacgcccttatttcggcttgcaaagggcaggcctgtcttttcctctaccggcaaggcatcaatatccgcccggagagccacagttctgcacgccttttcggcctttcccccccgcagcatcgcacataatccggtatggtccgggaagcgttggatctcggtatagcccattttctgaagctctgccgcaatatgctctgtggtctggacttcctcgaggctcagttccgggttctggtggcaccatctgcgctgttccacaatgtaatccaatgcctgttcagccagttctttatagttcataacagtcctcctatttctgaagaagcatctccaaaatcaaatcatcacatttagaggaaccctcattcccaagccgcacgaaatttctgatcgtttcttccgggtctgtttctacaattccatctgtcgctttcacgctttcactccgaagggccatagcggcacattggaaggcggcaaagacacaggtgctgatcttcaaggcgcagtctgccttggcaccgtcacagagcattccgctcacattcccaaacatattgtttacagcaaatccgatctgctccagcgtgcctccttgtagatacaccaagccgcaggctgcggcggcagcggcaatggtcgccccgcagagcccggagagcggtccgaaatccgcgtggatatgaatcgccatcaggttgctcagcgtgacggcgcgaaacgttctctcttcatcaataccaagactcttcgcggcagacaagatgggaactgttgcggtaatgccctgattgccggatccggaatttgtgatgaccggggcattggctcccgccattctggcgtccaccccgctggcagtcatggctacggcatccatgacaacatcgtgccccatcagccccgcttcctgattgttccggataccatggccgatattcagtccgtaatcacccgctgcgcccagctgcgcgatatgcccattgacttcgatggcctcttggatcatgtgtaaatcatcctgtcggcgatccatcgtctccacaaattcatagatcgtccggatattcagcgtcctgctgatctgctccggcgtgatatccgtttccatcgtctgcccgggcagctcacagcccaccctctggtggtcccgctccacaaggatcacattggtatgcgctcccttaataatggcgcgggactggtgttctttattcaccagttcaacttccacatacagcttgtccggatcaaacgcccttctcacgtccacatatccattttccacaagatgggccgctctttcaatgtcttccgggcgggcgtcatccacaacccggagctggcggtccaccgccccgcacacagcacccaaagcagctgcataatttattccagtatagttcgttccgggtatccccgcagacatcgcgttcttgatgatattcgcgctggccctgaccttgatatgctccagctctccatccaactgctctcgggcaatggcggctgtcagcgcaatcgcggcaggctctgtgcagccggtggccagcatcatctcatgattcaatatttgacaaatcagtttccgattcatagcgatacgctcctattctatgatcccaaccaacatttgattctacaaaagcggaacacttcgtgtcccgcttttgtagatgatatggcctttacaatcagaacattttggcaaatacgcttgcaatgataacggacgtgatcgtcacagtggtaaagccgccgacaatcatgggcgggaacatcttgctcatcagatattccttttcctccggggtcgccgccagagcgttgcaggtgttttcagtgataattgcattgggcgggaacccatacagggcagtcaatgcggtggcaaaggccagcaggaacgggatcttcagtatttttgcgctgacgaagcacaataccgccatgccagcaacaccgacaacaatcagaatgaccatcggcccgatgatgctgcccagcatctggggcgtgcaatccttcaggccgtcaaagatatacatcatcagagcgaacatgacaatgccataggaattgcttttattcagtgcgttctcatccagaaaaccaatgctggtgaaaataatgcccagaaccagtgcatacacagcgccgctgatcgtcatgttcaggccggggatgacaactcttcccagctgtgtggccagccaggccacgaatcccagcttgcccagcatcaccacaacagaattccacttggcaggcgtggggggcagcagtttcttgcgcggactctcggtggtttccagctttccgttgactgcatctaccgcatttgaaacgccggcaaccgacacaccgccgttccggtattctttcaggagctttttgccctccagctggaggcagaccgccgtaagcggataccccgcgaacccctggacgcagtacatggcgatagcaaacacagccgcttccttgaggccggcagcattggccgcctccatcatcgtcgttgcagccacgatgcctccggtgagaggaggcagtcccgcgacaacaaagctgcggtccatgagcagggggcagacgaacagtgccaggacgcacatacccgcaagtcccgcaaggcagaccacaatggtcttccactgctccagcagctgcttgatgctgatcacggtgcccatgtgcgtaatcagcagatagataccgattgtgctgccaaagggaatcagtacggcgtcgctgatcagcgtagtgggaaggactgtccagtagcccaccagaatgatagcggcagttacgaataccgatggaatccatgcttttgttgccgtggaaacgacctcgccaatgatgtacactgcagcgcagagcacaaacgctagtgcaaagttatacatgtcttttccccctctttacttattcagcacatatttcggcggcagaactgcctcctttcatggttttgcattctcccacccaatatgagtctgaccaattactgtgcgttgaaatccattgccacctgcgcatagagcatggcgcccttcaaaagctgtgcctcatccacgcagaaattgccggaatggtttggccaaacggctccgcaggcctcgtttccggttcccagcagtgcgattgctcccggcaccctctgcatgaagtaggagaagtcttcgccgccggtggtagccggattggatgcgaggcaattctcacccaggacagcaaccgcggatttttgggcgatggaaaccaccgcctcatcattgacagtgggcggcacgatgcgcaggtactccagctctgcctcagcgcggtaagcctcggctgtgcctttgataactctttccatccgttcctcaaaggtttcccacacctcattgctgaagcagcgggtggttcctgtcatatagctgttctccgccactacattccaacgggtgcccgcctggatcgtccctacggtaacgaccgccgggtccataggcgagatctcccggctgatgacggactgcaggttattgatgatggcagccgttacaacagctgcgtccacaccccgctccggctgtgcgccgtggcacccctttcccttcacagtgatatggaattcgtctgccgacgccatccgggggccggcttccagagaaaccatgccggacttcacatctgtccacacatgaatggcaaaacatgcgtccacgccgtccaaagcgccctgctcaaccatggacttggcacccagagctacctcctccgcaggctggaaagccagttttaccgtgccgcacagttcttctttcatgtcatgaaggatgcgggtggcggtcaggagcatcgcaatatggcagtcatggccgcaggcatgcataatgccctcgtttttgctcgcataaggcgccccggtggtttcctgaaccgtcaaggcatccatatctccgcgaagcaaaatggtcttgccgggctttgcgccttgaatggtgaccagcacacccgtctccagcccacagggccgccaggaaacgcctatctcgtccagcgcctctttgattgccttgctggtgtgatattccttggtgctgacttcaggatgctgatggaaatagcggcgcttttcgatcagatactctccgtattgggcggcgacctcttgcacattcataacaattctccttttctcgcgaattttttcgctttaaatggttaaatcattttgaactttccaaatctgattacttcaggaattccagagcaatagaaaccaaggtcctgatgcctgccggcataacatcctcccgaaccgcacacttgggattgtgcaggggcgccagctctccctcgtgtcctgcataaagcatcagataggcgctggggataccacccagctttccatagaagctgaaatcctcactgaaaggcattggatcgggcatgggaccaccgcgtcctcacccaattcctttcggaccgcgtcagcggcaagatccatcagctctttgtcattgaaagcgctgggatatccgtcggcatagtgaatatgtactgtatttccggaggcggcctcgataccttttgcaattgcctggacctgttccttaatcacgcttcgcacactttccgaatacgctctggtcacgccgccaaacttgacctccgccgggatcacattgggcgcgtcgccgccatggatgctccccagggagaatactgccatctccatagggtccacccggcgggcgacgatctgctgcatcatcacgatcatctgggcggcagccagcacggggtccgttgtattctgcggctgagagccatgtccccctctgccggagacggtgaagtcgaacaggtccacggaagttgttatgggcccgatgtggaacccaacctgtcctgcccggtgggcgtccggcagcacatgcattccatagatcgcgtccacatgggggttttccagcacgcctttttccacaagctccttggcgccgccaggtaatgtatcttcgctatgttggaatatcagcttgacacagcccgcaaaacgctctctcattccgcacaggatcttggccgcgcccagcatcatggatgcatgcatatcgtggccgcaggcgtgcataatccccggattctcactggtatacggcagtccggtttcctcctgcacgggcaatgcgtcgatatcgcagcgcagtgccacgcagcggcccgggcctctggctccatggatcaacgctacaacggcggttggtacaggccgttcgattgcatcaaccccgtattcctccagcttctttcgaatcagggccgatgtccttacctcgtttcttccaatctcaggatggcggtgaatatccctgcgaatctctaccatctccgggaaatattcctccgctctttcttttatcgtactcgtctcaaatttcctccttcctgcatggcttccggaagccattgtttgttcagcatggtttctatgtttgcgaagcaaacatagaaacagggatccctgtttccgacaatacgatgttgctttaactatactttatctataataatcctaaaccacaaagtatatcaagtcaatatttttctcctgacttttcctgactccagcattttgagcacttccttgttagagtcggagacccttttccgggtcttgtatcctatcggcggaaagccagaagcgcactgacacaggcggcaaatttccacatggcgaaggtgctctgacgcccgatcagatactcaatgcagaatgtagttgcaatatccgctcatcgtacgtccatccagcgcacgtttccaggcggtcaggcccattggtcttgctgcggtctgcattggtgcaaatgatctctgccccaccgcgccctgtgacggcgtaaaagcccgcagaacttattttataccacggtatagaagtcccgtacggtggcgcccggcacagatgtcaatgatctgctgccagatacggcgctcactggtccgaatggaattacctccgctccagcggttttaaaggagccgatgctgaaagtagtcctaccctgcctgaggcgttcatcacccaaggcaaagttcttggttcattactctttcagttcactggtggcccaaatgcggatgtgggcggcccgcagcgatggtccaggttgtaaaagcgggcttccctcgttttggtctttctatccatcgctccgtagagcgtgcttgttacatttttgcaacaactcctttgtcctgcaattcgcctttctggacgatattagtttcctttctgagaatggcttggaatggcgagaaggaagataagctctcactcttaagttcacgaacgtgatattataagaaatagtatttgcattcgccccgcaaaaagccgttgcaccgtgaaaagccttgagaatactgaattttttgccttttaggacactggaaaacacactgattttcggtgctgtggtgcccaaattccttgcggcgatataaaaccacacaagcaaatgtaaagaaaaatcagaattatcgagggtaaaagcactccctgcttttgccctcttgactgccgcacgagcagaagcattcgtacttgtcagcggcgggcgggtcccgttcatcttgactattgacaagcgggaatggttctgctgtctcaggatttatgcaaacctcaaaaaagcggcagaccactgcgggcagaactctgcggcgaaggtctgtcccagactgtccggggcattcaaaccgcccttcatgcagcactgaataaagcggtggaggaaaacggattttctgtaatccctcagatgggtgtaattggagcaacgggtgatatttgctgcatcccataaattgggtgatatcctacgccacccatgtccgcgctggtcttagagggctactgggcgcacgccaaaatgaaatttgacaagtgctgaatactataaaatttctcctacagccatcataagtgatgttgtactcggcttttcaagttagatcaagtgttggcggaactgacaccagaggaacggagtaaaaagcggttggagcagacaaacccggttttagacgcactgtagtcatagacaaatgagatgcaggtggaagcagcaccgaaatctgcaatgagaggagttatccattatctgctgaagcagtggccgtacctgatccggtatctggaatacgagcaactagaagtgagtgccaaccgcgccgagcataacataaagtcgttcataatgagcaggaagaattggctatttatcaatacgaatacgcccgctggtacgcagaccagcgcagttccacagtttcattgagccagcaaaggaaaacggccttgatttgtaccggtatctactttggtttcagaaaagtgcgctggtactgggccaaaatccaggctgagaatctggctcccgccaaggcctcttcggaatccaaaatgcttccataacgaaaattaccctgcttatattggcaaggcaattccaagcaccgttatctttaatggttacaaaagtcccgcccctccggtactgggccggagggcgggactctcgtatgatgaggcaatcagttcagcgggggattgcgcatggcgtccttatactgttcgccgaaagtgtggatggctcgcactaccggggtagccagctctgcgccggtttccgacaaggtgtattccactcgggcgggatctcgtgatacatggtacggataatcagcccgtctgcctccaactccttgagctccgaggagagcaccttggcggagatgttgggaatcaaatctacaaaatcactgtagcgtagatggccgcctttagactcaaaggccagcagatagagaagcaacagcttccacttgcctcccagtacaagcaatgaacgcatgacggggcaggtgacgatgttcactgcctcccggtgattggtgattttatctctggccatataccaaagacctccttctgcctgatgtcagtttgaaaccagtataatggaagttttcaaaaaatcaagtcctcgaaaaatagggtatttctgtaaaccggcgaggaggctggcagagttccaggtttttcctgacgttttcgtaggaagtgacaaagttttgcgttagattttggaagcggctacggcaacgggtcataaagcgcgccaataaaattagccaaaatccacaaaaaacagcagtgcttcggccaaaattaagtaatatactaaccaaaaagtaactagattggcaaaaagtgcggtcttacttttcactaagaacctgttatgatggtgtcaaagaaaagccatggcaaatacatacaaaggagaggttttatggtgaccaatgaagttctcaatacaatcctaagtcgcaaaggcgtaaagcaatacaagtcgaatcctgtgccccgggagctactggaggccatcgtggcagccggtattgcggcccccaacgccttcaaccggcaggcgtggcatttttctgtgataaccaacaaaaccctgctggaggagatcgacgcagaaaccaatcaccgcttaggggatgaagaaggctaccattccctgtacggtgcgccggttctgattgtcatctcctcggcccgggacaataactttgcaaagcaagactgctccgccgccaatgagaacatggccctggccgccaagtccctaggactggcctcccggtatctggatgtacccaacctgtacactaataccccggagggcgccgggtgcaaggagatgtgcggaattcccaaggactatgacacagtgtgcttcttgtgcctgggatattccgatgatattagcgaacagcccacgccaaagcgaggggatgtcgtaaattatgtagactaaggaaaggaggatcaggatcatgccgaagattgttatcagcgggatcagcgaggaggtggtacgcacggttgcccccggctgatccctgccgtggcagaggcgctggcgtgccccgtggagtggatttcttttgaatatgtaccctctgtatactttgcggcagaggcagacaaggagcgctgccccatggtggagatctactggttcaagcgacctgtggaactgatgcagaagatttccagtatcttctccgaagaattgtcccgggttggcatcaaccgggtgattattcagatcattgataccctgcgggagaattatttcgatttgacctacggtgccaaatagcctcattctatattatatttacaggaggattgatccatgagcagcaatgagtgtgcaggactccagacccagtacgatgtgttctctctggacaaagccgagaccttggcccttctccatggctgtggcttttcctatgaggagctaaaaaagccccgggttgccgtgttcaataccctcaaccccatgaaccccgggcacatccaccagggtgctatcgccaaggccgtggcggagggcgtccgtgaggccggtggcctgccggtggaattcaatggcaccaacctctgcgatagtatgctggaaaatcagaagtacaccctacccagccgcgacctgttggtcaatgatattgacctgatggtcagctatcaccggatggacgcactggtaatgattggcacctgcgacaaggtgctacccgccttattgatggccgccggccgtctgaacctgcccacggtgattgttactggcggctacatgaagcctggtaactaccggggcgagaatgtggacttcatcgacataggccccaacaagacccgcctgcgggacggcaaaatcactcaagccgactttgacgaactggtggacgtgtctgttcctggaggcggcgcctgctgcatgatgggcaccggcaacactatggccattatcaccgaggtcatcggcatgtctatgcccggcaactccagcacccccggcagaagccaggaaatgcaggagttggccaaggccgccggcaagcaggtcatgaagctctatgccaagaagatcactgcccgacagatcatcaccaaggagtccatcaccaacgccatcaagacctgcatggccatcggcggctccggcaataccatcatccacgttcccgctgtggccaccgagtccggcattgagatgaacttcagcgacatctatgccgccgccagcttcgaaattcccctgctggtgggcgtccgtcccaacggcccctacaatatggatcagtatgccaaggccggcggcacccaggccattctccacgagctacggaagcacctggataccaactgcatgtcggtaaatgaaaagaccatcggcgaaaatatttccggccacgagattctggccccctccatcatccaccccctgtccaatcctctggacaatcaaggcggtctggccctgatgcggggcaacctagttcccgatggcacctatatcaagcagtccgccgtaccggagtgcctgatgaagctccggggtcccgcccatgtcttcaacaacatggacgatgccaacaacgccctcctcaaccacgagatcaaggctggcgagattgtcatcatccgctacttgggtcccaaagcttcctatgactccgcctactggttcacctcccaactcaagggtagcgacctttataccaaggtggctgtgattactgacggctgcctctccggtgccgcttccggtgccagctttcagttcgccgcgcctgaagcagcccttaacagccccctggccgccgtacgcaacggtgacatcattgaatatgatatccacgccagaaccatgaacgtggagctcaccgatgaggaaatccagcagcgcatctccgagctcaccggcgaagagtacccccacttcacgggttatctgggtatttatcagaagggatgcatctccatttcaaaaggtgccgtgctccgctgatctctccactaccacacacattataattggaggaaacgaacatgaacaaaacatggaaagagctcctgtgcatggttctgagcgccgttatggtgctgggtctggcagcctgcggcagtagcaaggccgaagcctctgcaggtgacggcgatagcaccagcggcgataccgctgctgattccatcgtcctgaagatgtccaccgcccagcctgaggagcacattgcctcccagaccgccctgcgcttcgctgacctcattgagcagggcaccaacggtgccgtcaccgtgaagatgtattttgccaactccttgggagctcaggacgtcatcgttcagggcttgatggacggctccatcgacctgtccttggagtttatcgactccacctacaacccggtctttgaggtgcagagtcttccctttatcgcctccaacttcgatgagatggaatacatcttctctcccggctcccaagtgtattccctagttgacaagggcttcagcgacatcggaatcaagctattgggcgtctactgcgagggcctgactggcgtgtcctgcaagaacatgcccgagtcctataacacttgggatcagaaaaaagaacccatccgtgtgtggaactccgccgtggctaaggccggcatgaccgctatgggctacaacaccgtggccatgacctggtctgatacttacagctccatccagaccggtatcgtcaacggctccgtgggccagacctccctgggcgtgtacaccaacctgcgtgacgttgttaactatttcatcccctataacttcggtgccgagttcgtgcacctggccatgagttccacctcctggggcaagcttactgcagatcagcaaaaggtggtgcaggacgctgccacccaggtctgtaaggaaatcttcgactccgccgagcagactgaggctgatggtttcgctatgctgaaggaagctggcattgaggttctggaactcagcgatgctgaccgcagtgccattgcccagcatgttcgtgaagaagtctggcctgcccaagaagagattctgggcaaggaggccatggatgccatctatgccgacctgaaggcctgcgcaaagtaaataagactccctaggatatggaccatcaggctgattctgcgctccggcgtggaatcagcctggtgaaagaaaggagaaaacgcatatggaaaagctggacgctttcaccagatatttgggtaactgcggcctgttccatttctttgatgcgattcagaagtgggttctggtattcaccggtattattgtctttgttctgaccatcgccactgtgttcctgcgctatgtcctgaccatgaacgttctggggctggacgagattattctccttgttattttctggcaatactttatcggcgcagcccagggcagccgggaggattcccagattaaggccgacatggtcagcaccgttgtgaaaaataagactgtggtggcctggtgccacctgctggcccgaatcattgagtgtggcgtcatcggtgtttgcatcaagtggtctatagattacattctcaaggatatgtccgtcatgccctatactgtggtgctctccatccccctagtgctctcccatgctgtgatgttggtgggttttgccctgatgctactctatcacatttactggttactgacggagctcgtcaacgttggtacgctgaagaaggaggaacagcaggcatgattcatgttggaattgccattgccatcctgatgggttctctgttattgggcgtctccattccctttgcctttggcgcaggtacgatttacatgtataccatgctgggtggcacctttgccaccactttgccggtgggcttcaacggcatcaacaccatggtactactggccattcccaccttcatcatggccggcggcttcattgaaaaaggcaaggttggcgatgagctggtgtccgtggtagaaatgctggtggggcgcttccggggcggactgatgctggcggtgtcctatgcctccgccatcttcggcgccatctgcggttctgccgctgccacctgcagctgtatcggctccattatggctcccaagctgaagatggccggctacagcaaaggactctccgcagccctgatttcttcctctgccccgcttggcctgctgatcccccccagttccctgatgattatgtacgcttgggtttccggagaatccgtgctggcctgtttcctgagtactgtgatccccggtgtctgtcttgccaccttgctgggcgtggtgggtatgatcctagcccagcgagagggcgtgcagcccctggagaactgggtgcccatctactccgcccccggtctgaaaaagacttggcacgccacgccggccctgttgctaccggtgattatcctaggcggtatttacggtggcgtcatgacccccaccgaggcagcctgcgtctcaaccctgtattgcattcccgtggccatttacatctaccggggcatgaagtggagtgacgcgccggaaattcttaaggaaaccggcaccactactggtgtcattatggtgatgctgttctttgtgagcatgctgagccggtacttcatctatgaggatcttcccggcgccctggtagatatgatctatctctttaccaccaacaaaaatgtcattctgctgatgatgaatgtgttcatgattatcatgggtatgctgatggatgacggctccgccctgctgctctccacccccattctggttcccattgccaaggaaatcggcgtgagccctatccacttcgcagccattctgggcgtgaatcttggtatgggtaatgtgacgccgccctgtgcccccatgctgtatctgggtgctcgggtggtgggcaccgacgccagccactccatgaagcccacgctactgctgattctctttgcgtggttgccaacgctactagtcgtcacctatgttcccggtttctccctgtggctgcccaacatatttgggttctgagccgagaaaaattacggaggaatttctatggaaaagattacgaaaatcgaaaccgttgaggtggccatttcccgaaatggcatctcccaagctgttcgcttcggcaatgtcctcttcgtttccgggcaggtgggggaggacatccaaggcaacatccccaaaggtattgaggctcaagtagagctggctattgaaaatgcccgtcgaattctccgagctgctggctctgatttggataaggtgctcatgtgccgatgcttcctccagaagcaagaggactttgccggcatgaaccaggtgtatttcaagtatttcggcgacgccaaggtaggccccgcccggtataccgtagtggcacccccggtagcagactgctatctctttgagatagctatgttcgcagtagtggagtaatttacgggaacctcataaaagcgccccgtcgggcgaatgatatgaactgggccagtaaaagtggacaatagagaaaatgccccctgtgtaggagaataaacctatacagggggtgttcgtacgtcaagagaaaatgcgcgcatatccagaaatttgagaagggaactctggctatgcgcgagacaggagcaacgcgtcaatagttatgggggaacaccttgctccccgccacgcccgcaaggccgcacagctttttcatctctaccagatacatttccaggacaggcgctttccgtctctggtgagaaagatctcaccggagacgatctttttcattttggcgtattttcagtagcctgcggcagagcttttgcggcagtaagattgtccagcctagcccttcatggcgatctgtgccacgcctgtcccggcagcctccaccgtgatataccgcacctcgttgccccggatgccagtagcgcagattgtctctatcagcagtgccaggcggtccctgccgaggcccggatcgccgccagcatggcgttcaccgactccagccggtattccaggccggacagcccctcttccaggcggacaacagttccttggtagtcttccagcccgccgcccactcggcaaatccccgcagggaacgcaggtacgtctcgatggtccccgattcccgctcgtcgcggcacagaaattccgcaaaccgctccattgtttttccttcatcatatcagagtcttcctgctatcatacgaccggaagtcttcacagcttgttgatagaactgtcccttccagaaaaatattgcaagcggatcagatagttgcttctttctcaactattggggtgcgatggtgtctaccgcgccccaaaatgtctgtcataatcactgtggagtccacgcccttgtatacgaatcccaaacggggatatagtagctcagtacgttctgcatatttgccataggttgattgcagtggtcatttgtgtgagcactataataaagcagtcctgccatcgttactggtaagtgaaacgctcgacaacatcatgccagacaacgcaagtaacacgatcttccgttgaaatatcgctgttcgtcttattggtctcggacttacttatactgtttcagagaaactgtaatatcgctgagactggaaactcccttggcatagatgccgaaggccagtgtactctccaattcctccgcactgtcggcgatataaaaggttctggccagcgtttcgcccgcgccaatgtccactttcaaatccgcccagcgtgagcgtcctgcccgcagtcgcggtctgcatcgcggagccgttgttggtcacagtcagcgcaatgtagttcccatctttggggtagaagttggattccagcgaatagcagcaggtggtctggagcttggtgttgtcctgaattatgccgctcaaagacttgccggcggccttgactggatcgatctccgtaaacgggccgtggacgcctccaagtacgggcgttgttgcgttagcagggatactcccatcgcccctctttccacctacgaccacataatccgcaggggccgcgccaagattgacccggtttttctgactgtcccggcgcacttcaatgccgagcagtttggagatctggcggatggagagataattggtcttgtcctcggcaacatccacatagataatgaccgatggtaccccctgcccattgggcgctttgcaagtttcaccggcaaggaccttatcctcaccgaacagagatatcccggcctggttgtattccacccggctggaagctgcaaacacgctgcccacaagggaagccaccagaagcatcgccgccatgcccgcaacaaatgatccgtacttttttatcatgaaacctccattgtctgttttatatagcgagcatcttaaacttctattatgcaaatgcagaaggaggttctttctttacatctcttatattttttctgttttcgccaaagaaacgctctcagttatgtgcaaaatatcctcttaatcaagatgtgcgtccacacagaattagaggttgctacttatgtcaatacatgtaactgtgctttgctgttttttccaattctcttccaaaaacagttgtccatccaggccattcactgtgaccggaataatttctgcgctttccatggcaaaatcactcgtggccccctcctgcatatacacgtagtccaagtatatcgtttttttgagttctttatttcgataggtgttgcaaacatagtttggaaattcttctcgttaactctcaatttcaccatatccctccagtaagtccgtaatttcataccaaggcatatctccggcaatctgttctcccgaatgtctgtacgtgatatgtgtctcataccactccacaacccggcgcaccaccgcggcccgcaccgtttggctgaccgccatcaagctccccaagctcaacgaaaacacaagcaagagcataacagccttttgtctcacgcttttccataccggtcgtgcccgctttcgcgcgcacttcaatgggcctgtcagcatcgccgtcatctgccgccgataccggggcgattctgttccagtgggcggcaggttcccacctgtttggtaggccacgtaagtcctgtgatgcaaatcaaagataaaaccctcggaggtgaaacctacaatggcaaaacgcaggccgtccggaaacagcatggtccgcaagcgggagaacggccgctgggagggccgcatcgtggtgggtcgcaaggaaaacggcgacctcatcttccgctacacctacgccgacacccaaaaagaactgaccgcaaagctccggcaggacatcaccgcctatcaaggcgtggatctgacggaggagtgcagaatgcccctctcggagtggctggaccgttggctggagcagataacatccgtcctccagtccagcacgccggaacactaccgcagtgacatggagcaccacgtcaaactgtacttgggctagaagaagttcacacaaattacaccgacagacctgcggacgctctatgacaccttaaaacagcgtggcagaatccatccccgccccggccagagccgtgggttatccaacaccacggtccacggcatccacaccaccgcaccatgcgctgaagtctgtggtagaccaacggctgctgccccacaatcctgctgaccatgtggcgccgctcaaggtggctcacaagtccatgaccatcctgaacgaggagcaactggatgcttttctgacagcggtgaaacaggatgctgtccggaaagccttcttctacacggagctaaccaccagcctgcggctgggtgagatctgcggactgatgtagtctgacttcgatttcagaaaaggaacactgagtgtcaaccgaaccatccacaaagaaaagggctggcaactaatgaccggagataccaagacctacgccgaaaccaaaaaaatcgtcctgcctgacagcaccgcagagttgttacgaatccgaaaaaatgttcctactccgtatggttctttcccaacccacccaaaccagaaacacctatgaatcccgccactgcttatcatcaactgaaaaatatccttgcaaaaaccaagttggagtgcgcagcaaagctggcacagctctgggatgcgctgaaagaacctacactagaccaacctaaacccgaaatcttgctggcggactggctggatctctgctatcaagaatataaaaagccaaatctcctcccaaacacgcaaatgtcttatgagcggcggatctatcagcatatcatcctaaagttaggacaaatccaaccggacaagttgaacaccacagacattcaggaattctatgtgtcccttaaaaaggacggcaggctgatccgagttgagttctacggcaaagggctgtcagattaggccgttcgcagcatccacacgactttccacgctgctctggacaaagctatggaggaaaacctgatcttccgaaatcctgcggctggttgcaagcttccctctgccaagcccagagaaatgaaggtcctgataccggaggaaatccagcggttactgatccaggccagagaggggctgctatgaactgctcctgccggaactgtccacaggcctgcgccggggtgagatctgcgcccttcagtggaatgacctgaatcttaaaaccggggcactccaagtgggataataggtccaccgggtacgtggtgagttggtagtctccccacccaaaaccaaagcaaggcaacatatggtgctcctccctccgccggtcctgaatgtactcataacctatcgaaactcctgcacttcccggtggatgtttccttcaccagtcaaggaggattcccccacggacccagtcactatacaaaaacggctgtctaccgtactaaaacgagctgactgcaagagacttcggttccacgatctgcggcataccttcgccactgcctccctggagcacagcatggatatgaaggccctttccacgatcatcggccatgtgtccagcagcaccacgctgaacatctacgctcatgtcacggacgagatgcaaaggactgccgtagccaaaaaagaccgggggatcggcaaagctactcccccatcgtcaatggaaagcgcatcgcccgcaatgtctacgcccctaccgaggaggaatatgaacaaaagctggccgccctcatccaggagatgagagcaagagatcgccacagggaaggcacaggcaatggcgggatgaaatgcacagggctccggcggttgttccgccggagtcctaattttttctggttattgctgccagaggcccggcagatacgcgcttcaaaataggttgccatgccgtttccctttcctgccaccagcaacttggcaggcgcttttgcaatcacaagtgtatctaccagcaccatccgggcaacggtccagaaacagataccgatcaaattcaccgttatctcggtaaatcacgctcaatgagctacagggggatctgtcgaagccaccgtagaaatgatgatcgccggtaatcccgcataatacgcgatacccttggtcatatcctgaattctttctccgccgattcccataaccactgtagcggcctggaccttaccctttctactaggcggtcaatttgggactgagagcattctccctgaaaaatctcataccgaacgatataatccgtaccggcaaaaaattattccaacacaggcccgatccgccggggccaggactcactgatcagtatgagcaggatctttcccattccctgcaaatattgatccaattgctgtagcatacctgtactatggacatactttgatgggctttttttaattatactcatagtctgttcctccgtttgtacaactcattattccataaagctgggaagccagaggcaaatttggggaatataggtaataagcagcagattcaccaggcagcaaatcatgtacttcagcagatgccggttgaccagctcacccaccttcgcctgccgcagagtcgccgccacatagagattgatccccagcggcggggtgatcatgccaatgcacatattcagcagcataatgatgccaaaatggacaggatcaatattgtaggcagagagcgccgggaacaggataggagcaataatcaggatggcaggcgtggtatccatgaaacaacccacgatcagcagcaacacgttcaccagcagcaagaacaccaccttgttagaacagatgctcatgatgaactccgccgcatgggcgggaatctgctcacgggtcatcagcaggccgaatacgccagcacaggcaacgatgaacatgatcataccagaggaggcagccgcagactttactgtttccaccaagcccttgaagttgatttcccgatagatgaagcagcctacgatcaggccatacgcgcaagcaacggctgcggactcagtaggtgtaaaaataccggtgtagatgccgcccaagatgataatgggcatgaagatggcaccaatggcatgataagacgcagacaaaaattttctgatattaaacttggttctagggatccgattttttacgccgtagaaaatcgcaaaggcaatcatcagtgcacccagcgtgatgccgggaacaattcctgccatgaacatactgcccaccgatacacccgttgcggagcagtatgtgatcatcacggtgctgggcggaataatcgtgcccaacataccggctgcagcaatagtggacagggcgaatttgcggctatagcctccctgttccagcgcaggcaccatcactgcgccgatggccgccaccgttgctgtgggggagccgcacaaacagccaaacagcatacatgagaaaatcgtcacgacgccgaggccgccgggcatccaaccaactgcagcattggcaaaatcgataagtcggcgtgaaatgccaccactgctcatcagtgcgccagccaacataaaaaacggaatggccgccagtgtaaaactatcgacggaggagaacatcttctgcacggaggtgaacagcggcatcaagtccccggcaacgatggccgccataccgccgcccaccagcgccagcgcgataggcatacccagaatcgtaatgacggcaaaaaccaggaaaagcgttgcagtaatcatgcttcaatctcctccttccgatgcataatatccttaatcatggtttcaatgctgtaaagatagtgaatgattcccataaagaaccccataggaaggcagaagaacacgaccgcagtgggaatctgcgtggttgtggtcatctgcttggtcatgatcagatgattaaacatctgcagcgaaagcacaaacagcagcacaaacatcagcatgcataggatctccgtaaagatccggacctttttatagatcttttccggaagcatatccacgaatacttccacaccgatgtggctcttactttttacaccaatactggtgccaatataaacgatataaatcatgaggtaccgggccaactcctcactctgcagaaaagggatcttcaaggcatagcggcaaataacgctccagcaaacgatggcaaccatcgccagaaaaaggacaacactcaggaagccttccactttgctgaaagcctgatcaagttttttcaacatggcaaactatgtatcgctcgttttccggcgatacgctcctttctcccgaaatgaggcggagcggcggcaaccgctccgcctctgttctcaagttttttgtgtcttattccacagcctcgacatccgtctggattgcctctaccagaacaggatcgatgccgccctctcccacgtacttctcatacacaggctgcaccgcagcttcccactcggtctgatcaatctcgatgaactccgcgccattggcctccatctccgccatgtactccgccaactgctcatcacagatctgatagtggtactcacgggcttcctctgcacactccataaccagctgctggatatcctccgacagggaatcccagagagatttgctgcaaatcagaggagcgggagaataaccgtggttgctcagtgtgatatagggagcaacctcatagaagttctgggtatacatgttggtaaccgcagtggaactgactgcatccgctacgccggtctggatggaggtatagatatcaccccaagccagaaccacgggcatagcgcccagtgcgctgtacacatccgcctgcagggggctgtcgatggaccggacacgcattcccttcagatccgccagattcttgactggcttcaccgcgccgatggcataaatgccgttctcccaatagttgatgcccttcatcccgatggactccagggcgtccagctgcccctgagcagcctcaccgctgagagctttccgtgcggtggcagcatcggggaacagatagggcaggtcaaacacggacatggcatccgtaaagttggacagggacgcagaactctctacgataaaatcaatggagcccatctgcacaccttccagcgtctccttggcggatcccagcgtagcacccgagtggaccgtcaaggtgatggcgccgttactgcgctcgttgagcagttcagcaaatttcagaaggccaagatcccaggaacttcccaccgcaagtccgctggacgccgtccactcataagtttgtccctctgcgctttcaccgccggagctatctccgccgcttccgcaggcagtcagggagaacaccatggccatagccagcaacagacaagtcagtttctttttcatatgctcctccattaaaccgttatgtgaaacctgttatgtgttatatcacttgttgtagtagataggccggcccttctcgtcgtgatccttgtcgaatgtgggataagctccgccgttgaagccgttgaagcccaagggattccggaagcccagaggattgattccaacaggatgtctttccagcaggtctttgatgaaggcgctgtaaccttccacgaccttctccaccagtgcatcgcccttttccttgctggccttggtgggattgccgatcacgccgtagtccagatcgtccttctccatcagagcaaaagtgccgtcgaaatgataaaactggaaaggatgagaagtctcgccgggcgctttcttccacttgccgtccaccagcgtcgtgccgccgccgtcgatggccaggtccatgtggaccaagtcgccgtacagggacagcgccatggaggtctccgcctcgtcggcgtgccacatataatcggacagaacggctttgttgtcgcccaggaagtcataccaggtagaggcgaccgtgaagtagccttccatgcccagcttgtgaacagccggaatgaaggagctgtcctggccatgggcaaccagcaggatgaacttgttatagcctacattggaggcaccggcgatgatgtcgtgaatcagcgccatgttggtctcatagttcagcgcgatggtagcaggcatacccatgtgcatgtagggatgaccgccgtacatggggcaggggagcacggtggcgccggacttctccgccaccttcttggccaggcagatggcgttgaagctgtccaggccgttggggcagtgcgggccgtgctgctcaatggcgcccaggggcaggatcgctacgtcgttgacttccttggcataggcgatgttcacgggagcggtgttctgatcaaagaacacggaatctcttttgtacagcttgaattcagtctgcttcttcagttctgccatgataatcgtttcctttcttaaaaaaatatagatggttttttaaatcagctgaaactcagcaggatttacagttacggctggaacaaaatcttgatacgcatttccttctttgcccgaatcatctcgatcacgttctggaagtcttccagacgcttgatatgggtaatgagcggttttaccttcagcttcccctctaccatgtagcgcagcaccggcgtaaaggagttggggctggccagagagccgatgagcgccgcatcttttacgatcagcgtgttcatggcaacatccacattagctccattgtaccagctgacagctacgatccgtccggtgggcttcagggcctgcaccgccatattcagtgcgacgttgctgcccgatgtctcgatcacgatctcaggaccgccctcagtcagttcccttgcccgctgtatcacatcctcattgtgatagttgatggtctcatggatgccgcactcccgggcgatagccagcttctcatcccagctgcctgccatgatgacccgactggcacccgcaatattggcaagctgtgccgccagctggccaatgggaccatctccgatcaccagcacctgggcgccggcgggaatctgcgccttggtgaccgcgtacatggcggttgcggcaggctctgccagagcggcctcctccaagctcagcccttcggggatatgatacagatgccgttgcggtatcgccacatactgggcaaacacaccctggcggttgcggtaagatcctacgacctcccggttggggcacagattataatggccctgccggcagttttcgcactcgccgcatcccaagctcacatcggaggtgacctggtctcccgctttaaaatcccggacattcttgcccacagccaccaccgtgccgctccactcatggccgggaatgatggggtacttggtgttgccgtttttgatatggatcatctctcctgttagcagttcaatatccgtagcacagaacccggcataagcgatctgtgccaagacttcgtcatcccgaatctcaggctgcgggatctcggaatactcgattactcccggatccatgaaccgaatggctttcatcaggcggtctccttctttctttcccgatttgtatgacattgcatcgttcgaatctccccctgccggaagcagagcggctggcaagtcccttttaggagcagctgctcacaaaactgaccgggaagcccgccgtgctccataaaggtccagaagtggcagggcactgcatatctcgcgccagtcaattccgccgccgccgctccttcctcagcgttcatgttgccaaatgcaccattgacagacagcaccgcaatatccggctcaaagatcctgatctcctgaaacaactccgagtgaaacgccgtgtctccggaaaaatagagccgatgacctgcaaacgccaccaagagcccgatagcatccggcgccatggtaccgtgatccgccatcactgcccgaatcaggatcttttcatcctgatagcattctcctctgtccagacgatggcagcggtgggcctgtatgcccagttcaatgaacttctcctgacagctggcaggcccgaaaaacaaggtcctttttgtgcactgtgccacaattggaatcgcatcataatcgaagtgatcaaaatgcagatggctggtcacataataatctaccgccagctcttccggcgcgatcagcatgggtgagagtcgtttgaatcctcgaatccgctcgccgcactccgtcagatagggatcgagcaccatgcttgttccgtcgggagccttcaggagaaatccggcctggccaagccagcaaattcccagatgatctggaggaacttgtgttccccgaatttcctctgcgagattcatcctactacctttctcagttcctcaatataagcagccctcaagccaggaataccgctcgtcaaactggaccttgtacttcttcgtatcgccagccaggccccacagcagatacgcacgggtgccgggcagtgccaccgtggtgtggtagccggtgggcagcgccacggcggtgttgttctcctcgatcacattgacctcgtcccagatcttcttgttctcgtccgtcagatcatagccgtgctgcatgacgccgccgcggccagggccatcctcggtggaggtcatctggaaggagaagatctcatccaacacgcactccttgccggggcgctcgtagtcgtgccggtgcgccgggaatccgatccagccgccgggcacggacacggtctcgcccacgatcagcagcttggtgatgtggtcgttgtgcttgccgggctggccgaagatgaagcggtacttccgcttgtagatgtactcgccgggttctccctcctcgatattttcaggcgggcagaaatagggggcattgccctcctcacaataggcggtgaaaactctcgcctccatgcccttctcgctgtacagcttcactgtggctttgggcggcacatacagggcggtgggcagatcgtcatagacattgccgcgctggcccttggcgccgtccacaacggtcacgccctcatactccacccagcaggtcatgtcgccctgctgcagcacgatggcctgctcctcaccggtgaccttgtactccagcgtctggccggggttgagaaggattcggccgaatccctcataggtcatatccgagttggccttggagatcacgctctcatagccgttcaggtcctgaaagcggtatacagttgtgtaagacatttgcgtccactcctttttccttgatttgaatgcaattatttcaatacttccttgttgacgggataggtgaccggtttgccggcgagatactcagtgatcccctgggcgctgtccatagccatagcccgaagcgccccgttgctgagtgccgcattgtggggagagacgatcacattctccatggagaagagcggattgtcatcagcaggcggctcctgctcaaacacatccaggccggccccggcgatctcgccggacttcagggcctcgatcatggcggcctcgtcgatcacggcaccccgggcggcgttgatgatgaaggcggtgttcttcatagccttgaactgctccgcacccaccagatggaaggtagaggggaacagagaggtgtggacgatgacgaaatcggactttgcatacagctcctccggcgtcgccatggtgatccccagtccctcgacatccgcctgcttcacatagggatccgtggccagaatgttcatctcaaagccggagagcttcttcaccaccagccgggagatcttgcccatgccgatgatgcccaccgtggcgcccttcagctcgatggtcttgtaggtgttgcgctctttgaactggccggcccgggtcagctgatccatctgcaccgtccgcttggacagtgccagcagcagcatcacgatatgctccgccacggcgttcaggttggagaagggggcgttgaccaccaggatccccttttccgtggcgtgatccaccgcgatattgtccacgcccatgccgtgcttggcgactaccttcaacgtcgggatggcgtccatgatctccgccgtgatcttcgccgagcggatcaggatcgcggagcagccctgcgcctgccggatgatctcgccgctctccgtggaagtgccctgcacgacctcgaaattctcccggagatacgccaccgcatccgggtggatatgctcggtcagaaataccttttccatgtttatgtacgctccttctcagccgcggatccggctgatggtctccttgccccacttgacgatgatcccttcgtcagaggagagcagaatatactgcacgcccttggccatcagcgccttggccgcctcggcggaagccgccgtggtgcccactgccttgccggctgccagcgtcttggcggtgatggtgtcgatggctgccttcacctctgggtccgtggtcttgccgggtacaccgtaggactgggacaggtccatgggtccgatgaagatgacatcgatgccgtccaccttcaggacctcgtccagattctccacacaggtcttgctctcacagtgggagacgatcatcgtgttggcattggcggtgtcgatatactcctgcacgccgcaggtgccgtagtcacaagcccgcacgctgggggacaggccccgcacgcccaggggggtatacttcacataggacaccaggttccgggcctgctccggggtatccacattgggcacctgcacgcccgcatatcccaggtccagattctgcaggatctccacctgctggttctcccgaacccgcacaatgggcgtgatgccggccgcgtccgctgcccggacgatgttgctcagctgttcccggtccaccgccacatgctctgtatccagtacgaagaagtcgaaccccgccagggccagcagctccggaaccgcagggtccgtcagcttcacaaaggtgccgatggcactctcgccattgcgaatcttctccttgagcatattcttgcgcatttgtatgacttccttttgtgtaaattacaggttccggggcgaggccggatttcggggcagcgcgttcggtgtcttactctagaaaagccgccgccttcaccagaaaaagattctgctgaatagggacattgctgtcgcgcagcagtgcatccgttttctgtcagccaccttgtctaagtttctcccgcctcctgcggttgctgtccgccctgttattaagcaatatttatgccaaagtgataattctgccgaaaacgaattttttcgtgaggttcacacaaaagtctgggacgaaattgtgcatattggctataaatgccgcatatattcgtgcaaaaacaatgcatattacagacaaccgcactcttcatgtgcgcaaaattgcatcagcgttgctattttgcatacgagatgacggagaaaggtttccctctccccgtcatctctctttcgaaccatttacttattttgttttctggaagacatgtccttataaagctgcattttccgggtaatagtggacggattgacatccagcgctgcagcggccttgcgaatggatccgtatttttcgatggcgcgttcaattgccgcatattccgcccgttctactacgcttttcaatgaaaccgtttcctcttcttcctccgcagatacttgctgaggccgccgaagcttcagtggcaagttctcccgccgaataatgtcgcccggagtggtaatcaccaaattttccagcagattttccaactcccggacatttcccggccagcaatatccttcaaacgcatcgatcgtgtctgaatagatagatttattggtgtggtatttctggttttccaccatgaggaaatggttaatcagcggaatgatatcctcccggcgctcccgcagcggcggaatgaaaattgaaaccacattcagtcggtaatatagatcctcccggaacgttccctctctgaccatctgttccagattgcgatttgtcgccgcaatcactcttacatccaaggcaatgggttctgtcccgcccacacgggtcacttttttttgctgtaagacacgcagaagctttacctgcatatgcaggggcagatcgccgatctcgtccaaaaagaccgtccctccgttggcggcctcaaacaggcccttgtgtcccttgttgtccgccccggtaaatgcccccttctcatagccaaacagctcagactctatgagattttctggaatggccccacagtttacctgcagatacggccagtctttccgggggctgttgtttacaatcagttcagaaataatttcctttcccgttccggattcacccagaatcagtacggtggctccatcaaatgcggccacccgctgtgccaatgtaataacttcgttgaacgccttgctgtttgcaataatggtcccctcacccaggcggatccgcatgctctccagttggcgggactgctgctggataatcgtatccttgctcttcagactgttctggagttcattgagggctgtgatatcccggacattgttaaatacatatttgacatttccgacatcatcgaaaatgggtgtggccgtagccagaaccgtcagccgcgtgtgataattgtagctgatttttgaaatctgctttttttgccggataacctccagaatgacagaattggaaaaaatcttttcatccagaagctgttgcgtcgttctgccctccagttccgctttgctgacccccaggagcgaggcattggctgaatttgcaaagagcactttgccttctccatcggtaatccaaacaccatcaaagaggattccatcatttcaatcaaggcattgctatcaatcacggcgtatctccttttatatactcgcagctgcatcggttctaccgacaaatcattataatatggcaaaaatgcccaattccgcaaaatttccatgatatatttattgctattttatcaaatgcggggttctctgtaaagtgcttgcctttatatctcacatttcatgtttttcaggagaaaagaattgtcttcatggagcaacatcctcataacgagcaaaaagtatttaacacaacgaatcgtgacaaggaaaacttctccaacaaaaggaagggcaaggggaagcacaaaaaatggaatcgtaaaaattctgcaaaactccgtcatgaatgcttttggcttctatggctgtatcggctccgagcatttccacgtcgggccgtatgccttgacttgaagtgcgtttataccccatcttctgtaaaaaaattggttcatacctaaaactaaacggcgtagactgcatacagtctgcgccgcttaatttttccttctttatcatgattcccgcagccaggcagcgtagtcttccggggacagcctccccgcttcgcactccgcttttttctctctggcacgttcgtcccacgcgtagagctcctccggctccagctttcccgccttcatgcgagcaaagcgattcttgtattctctgcgatagtcctgaaacaaggcatccctgctcttccgtttcgtccacagggcaatggcgcccacttcccggcaggtgcggcctttctcgtcaaaaggccggctacaatattcggtgttggtacggcccgtcagggcaaagtatctcccgcagtttttgcacacccgcatcttcacttcccgcttgatgcactcccggaggtggtagtcaatgaggtcatagaccacctccggctccaaaacctatgcaaacacttcatcgtcgatgagctcaaagccaaccggctgcacacagaaccgaaaggcacggtctcctgctgccttgtagtaggagaccattttctgcggtaccgtttcctcggactcctgatccgtatccaatacatgttggatcagctccaggatctgagcttgcatctgccgaagcttctccggcagatgatacagatacgcccggggcagcacgtcctctgtatagctattgaatagcttggcatgggtaagacggcaattcatatccagccgaaactgctgaaaatagatgtggcgcgaagccaagtcatccagcagcgcaagcgcgttctggtgatgttgctcttctttcgttgctgccagtttccagaactcgtcattcaacttttgaataatggcgtctatggggtccaggtccatatagagcagcgacatcaagctttccgggaacgggactgtctcagaaaacgtgaccgcttcgccaagtgtctactcgctgtaaagatagtgctcctgctcatgggcgatataggttttgaatgtgtacctcatcaaagcaatgtgccccaccccagactaatttacaaactgttcattaattggtcttgacgcaaagagtgtggtttgttacgcccgggttaggcgagcaatagaataatgcctttaaaaccaagtctggattagacagttagaaaaatcaagaattctatctggccgcgattgtacctcgataactgcatacccaccaccaaagccgatacttgccggaaagagtgccgccagaactctgctgtcaagcaacaggcgcgcccactaaggcgaaaggaaacgccgtgcgtgacaaacaaggccgcagagtaggaaccggtacggcgtgcggcccacgaatttttgtaaaggaggtgcgtgtgatcagcgtacaaggtccgcagcaaaaggaaagccgccgaaactgctgcaacagtccgccggcacgccgcgttccgaaaaacgcagattccatctgcagacagtctaacagagaggcttccggaacgcaagattttgttctctgaatttcgaaaagaacacggaggtactctatgccgattctcggtgaacgattctatcaaataagcaatgccatcttctgctatgacctgaaaccgatcccgctggcggtatacagctatctggtctgctgcgccgggcagaaagaactttgctggcccagcatcaagaccatcgcactgcagctgttcggaaaacgttgcgagggacgcagtcaggcaattagtggatcgcggattcatccgcaaggcggcaaccaacaagctgatgcgccgcgacggaagttggcggcagagcaacaaccactactacatcctgccgctgcctgcgctttccaccgcagggcatcgtgcaagcaggaaatccaccacaggagatgttgtggaggaagtgtatcagcaaaacaaaggatagcaagggaaagcccgtgagcccagcaaagccctttgtagagcggtttgggccccagtaagatcccagctcctcccggggattttggacggatttgggccgattttgaggctctgcggaggacgaaaaaacaggagaaagccctggcgcttttatggcgcccaggcagtcacttccgcccgcagtgcgggtggttttcggggacatgggctgacgcttttccggaacgcccaaactacgattgacgctgtttccagagaagcagacgaatatccccgccattgcgggacattcgctgacgctatcacggatttgggaggtatttgacaatgggtgaaaacagacaccggcacaccgtctggatggacgatgccgtgtgggatcaggtggagtcccactaccagaaagacaactgctccaccaaaaatgagtatatcgaaaaggcgattcagttctactccggctacctgaattcggagcgggccggcgattacctgccccgggttctggccgatgtgctggagggcaagctgggggccctgggcaaacggatgggacacctgctgttcaagctggcggtggaggaggccctcatgggaaatctggtggccgccgggatggacgtggctctggacacactgcgtaagacacgggtccggtgcgtgaaggaggtcagagaaaccaacggtgagatcgacatggatgacgccctcgcctaccagaaaggggtgtaggaatggagggactgattcagaagtcgggctatatcaagtcgggaagcggcggcggacactacgctgaatacatcgccacccgggagggtgcggaggagttgaagcccggcggctacctggagtatatagcggagcgcccccccggtcccacggactgttctccgccgatagtcccgccgacctggagaaaactacggatgagatcaatgggcataccggcccggtgtggaccctcatctactccctgaagcgggaggatgccgtccggctggggtatgactccgcggagagctggcggaagctgttgttggctcatcagacagaactggcccaggccatgaaaatctctccgcaaaatttccgctggcgggccgcctttcatgacgaaaagcaccatccgcacatccacatgatggcctaatcgtcagcccccaagcaaggctatctcacggaaaaaggcatcgagcagatgcgttcgaagctgtccaatgagatcttccatgacgagatgctgtccctctaccagcaaaaagatctatcctatcagcaggtgcgggacaccgcgatagaggccatggggcggctcattcggaggatggaaacaggtctgtgccacagtccggtcatcgaaacgcaaatggaaacgctggccggaatgctggaaaactacaagggcaagaaagtctacggctacctgagaaagccggtaaaagcccaagcagacgcccatcgtggatgaactggccaggctcccagaggtggcggagtgctatggacaatggaacgaacttcgggatgaactagagcgctactacaaggacgcgccgagagagcacaaaccattctcacagcaaaaggagttcaaagccatcaagaatatggtcatccgggaagcagaggaattgcgcttaggtgcctttaccttcgaagatacgaccatgaaagacgaagtggatgaggatcaggaggcggtgtacaacatctggaactcccgccggcagatgtcttaggcataccaggctgccaaggaaatcctgtcagagtatgaaaatacagagaaagaaaaagcagtacaggtgcggatgctggagcagctctggaatgccggcttcaccgtagcggctcatctgctgaacaagtgctggcgggacagcatgggcgtgcttccggatgacgaacaggcggagctgtggttccgccgtgccgctgaagctggtcatgacttctcccagtacgcccttggtaaactgctgcaaagtcaaaagcgaatggatgaggcggtgtctcggtatgaaaaagcggcggcacaggacaattcctacgccgactgctggctgggaaagctgtacttcgaaggaaaagcggtctcaaaggatgtacccggggcggtggaccacctcaccgcctccgccgaacagggcaaccagttcgcccagtatgctctgggcaggctgtatctcgacggacgggaggttccgcgggacccggatcaatcctgggactggttctctgcgatggcggaacagggaaacaagtacgcccagttcttcctggcgcacttcaatgacacacagtcctcatatgcttctggccgccaccaagctgcttcaccacctggggcagatattccaggacaactccgtgccgcctgccgcaccggcgggacatggtgtggaccgaaagctgctccgaaagatcagggcgaagaagatcgtcatgggccacaagccgggtgaccatgaagatctcgagctaacacaaggcggcatgggaggtatgacaggatattgataggaccggaggatggtatcaaaatgtgataccattgaactgcacccccagagatagacaaaagtgataaaataaaaaaaggggggtaaatatgccaaaaggagtgccaaatcgtaagcgtaaaacagcgggaagcatcaacaaaagggcggccgcatggccgcctttttgctgaataggattcgcaggattaagagaggatcacttcttgcgaaagaaaatcatgtaccacatccaaaaggtgctcagggggaagttggagacgagaatcttttttaacgagcaaggccacagcgtttttgccgtgggatagggggagaaaccacagaaattgtggcccagccatctggaaaatgaccttgtactagaatgccataggaggaagtgcgggatggatgtatctcgtggaaaaaatatttgtaaagaacatttggtgaacatttggttctttggggatagtttcattacgctcaagaccattcaaaggggtgtcttgcttacgtatggtctggcgctttaaatattccgcaagccgtataatgaaatttttgggtgtaggacgttcaaccggaagatggttgctatagacttgccgcaggatctttttgtttccagtctcccaaatgttagttgttgtacgtgctaaggacctggatacagtttttgctttctttccagtctgttgctcgaaagaatccgatgtcttacccagatgcaaggcttctgtcccaccggtcatgaccagagagacaacacccagcagatcgctgctacctaccgaaccgacgtttccttcaatttcaaaaatcaggtcttgtgtgtcctccatagaaaatacctccggtaaaaaatttgacgttaaatctgtagttcgcaaattcgccgttttgagacaaaaagagacaccagaaaattcagaaacctaaaaggaaaaagagcctgcgtatcagcagactctttagcgtacagtcatattttcacagggatatcccaactgctttgcggggcgttctccggcaataatttctctgccaaattcttttcctctgccgcgagtttcggagcatctctcagaagccaggtcagatactggtatggggagagaggattctccttggcagtctcaatcatgctataaacaattgcactgctctgagccccgccttccgtatttgcaaacagctagttcttccggctcattacaaagggtttcacactgcgttccgcacggttattgaagatctccagctgcccatcccccagaaaccggatcaggtatggccactgttcccgcagatagtacagtgccttgcccagcgcggacttcggcacagcggcgctcttcgtttcagcccatgtcaataaagcgtccatcaccggcttggaccgggccagacgctgttcacaccgttcttccggcggcagccctgccaattcctgctcaatcccgaagaggcattatccagcccctccggtgccgcacaacctgcgcgttggtccttcggcagggcatccaccgcctcatcgaattttcgccgcaggtacgcccagcaaccaaccacccggatgtttttaggcaaccggtggtaaccggagtagccatctgcatggagccacccggagaaactctccagaaaggcagccgcgttctccgccttccgggtaggccggtactcatacagcacaacgggggacttcgcgtccccactggtgcggtacagccacatatagcacttgctccgggctgcccggccctccagtttcagcacctgcagcgtggtttcatccgcgtggagcacctgtcgttggaggagccgcctgtgcagttcctcatataccggtttcagccagtcctccgccacccgcagcacccagttgctcatggtctgccggctcaactgcacgcctgcccggttccactcctgttcctgccggtacaacggtgcgtacatcacaaatttctgcaccatgatatgggcgaccgcctccgccgaggcatagctgccgggagtcagggcagggagcctttccgccttgcggatcggcgtctctgtcccttcctccttgcatttggggcaggcgtaggtgaaataaatgttttcccggatcatcacctgggccgggatcatcaccaatgtgcgccggacgtcccttccaatctccatcttggctgtgccgcacacagggcagtctggttccttctctggaatccggtgttccaccacctcaaccggtacattgtccggcaggacctcctccggcctggaagaacgccgggtatgggcggccacctccgtctctttggctctccgcctggacaaccaggcttccgtctcgtcaaacatgaggctcaactggggcctatcagttcttcttccagccgctccgaggacactccgtagagtttcttcctgttcaggcgcacttgctccagaagccagtccaatttctggttcagctcgtctctttccgctttcagagacgcatattccgcccgtgaaatggttaccatctccggggtgcttgtcccatgatttctttcatttttcatgggtaaattatactatatttgaactggaaagtccagtatttccagggttttcagctattctaccgcctaaatgatacgcaggccgtccaccggacggtgggcctttagctgctccaccttcagcccctccatcagccagcggtattgctgcggcgtcaattgccgtacctcgttttccgttcgcggccattggtatgcaccctgttccaaccgcttatacaacaggataaatccatcccgctcccaatagaggcccttgatgcggtcccgctgtctgccgctcaggcaacggcgagagctctacaaaggctgccggtggctgcggtgctgaaactgcgggcacaagttctgtggctgccgatgaaaggatttccttttcccggcggtagtacgtctttgccgaaatattgtgttccgcacaccatccccttacgctcatgccgctgctgcggcagtctatgacctgtgtcttccattgttccagctttgcctgccgtttcaattcacacgcgcccatcttccccgccaccttctaaaatgagaattctcgagaagtctttagacttctcgagaattagtatctcatatcctcttcaactttttaatccgcccccagctttgacgcttacgccaaatcgaagatacagtgcggaattcaaagtaaaggtaatcgaaatcatgcgggcggaaggcctgaaccacagtgaagcaggccggcggtttgggattgagtctcatacactgcttcagatatgggagtggatttacttggcggaagggccggaaggtttctctgttgaacgacgagggcacagcggatcgggccgtcctctgaaacgggtaagccaggaccgtgagaaagagttgctggctcaagtacagcgattagaggcagaaaatcgatacctaaaaaattgcgggcctcggttttggaagacgagcagcgccagcgcaaaaagcgcgggtgattcaagaactgaggccagaaatccctttgaagatgctgctgtccgttgctcacctgtcaaggcccacattttatgatgagataaagcggatgaagaaggggaacaagtgcgcatccgtaaaaagagaaatccaagcaatttttaaagaacaccggggcagatacggttacaggcgaatcacagcggagctggaaaacaggaagattcattgtaatcacaaggtagtctccagactgatgaaggagcttgggttggtgtgccgagttcggatgaagaaatatcgttcttacaagggcgagatgggacaaattgcgccaaatctgttggagagaaactttgaggcagaacagccaaacgaaaaaatggtaacagacgtcacagaatttcatcttttcgggcaaaaactctacttatccatcctgcttgatctgtaagccgggacattgtaagctacacgatttcagatcgtccggacctaaagatggtgacctccatgctggagaaagcgtttcataaaattccggatgggacaaatctgattcttcactcggaccaaggctggcattaccagcatagaaagtatcgggacatgctgaaaggcaaggacattcggcaaagcatgagccgaaaggggaattgcctggataatgctgtcgtggaaaatttctttgggctcctcaaatcggagctgctttatctgcaaaagtttgcatccatagagcagtttaaaacagaactggtctcctatcttgaatactacaacaaccgaagaatcaaattgagcccgggcggtctgcctccagccgttcatagatgtaaaacccttggcgctgcttgagtcagtcgtagttgtccaatattttgggtgcagttcaacttttgaaaaaaggaaattgtaaagtctttgataactccgatcaaatagcgtggctattttatagaagttgcagtatgttgtgttgctgataggaggcgatcgatatgtcaaagaaacgagccaacggcgaggggaacatccgcaaacgcaagaacggccgctgggagggacgatacactgccgggtacgatccaaagaccggcaaacgcatcaacaaaaatgtgttgggtaagacgcaggcggaggttcgggaaaaaccgaaaacagccatggcggagtgtcaggggctggacgtcagcagagaagccgatgaacacacagtagccacctggctgaaaatgtggtatgaactctatgccaagcccaacgtccgcacagccaccgccaaccgctaccagctcatcatcgatacctacaccgtccccgcatcgggaatatcaaattgaagaagatgaccacccggcatctgcagaagctctacaaggagttattagaaaacggtagaatccatgttggaaagaaccagagcaaagggctcagcaccaccacggtccgcagcgtccacctgatgctccacgccgctctggaccgggcagtaaaagaacggctcattccccgaaacccctgcgagaactgcatcgtcccaaagccccgaaaactggacatgaaagtcttatctccagagcagatggggggctattttggaagccgcacagcggcgagatctgctctctatgttttatctggaactggtcagcggattgcggaagggagaactggtggccctgcggtgggacgacctggatgtccaaagcaaaactatctcggtaagcagacagtatgtccgaaacccggatggaagtctggagctcacaaggcccaaaaccgaaaactcagtacgtctggtgtctatcccacaggcagcggtggacctgctgctccaggagcatgaccaccatccggataatccatacatgttcccctctccattagccggagagatgtatcacccggacagcgtggtaaacctccacaaaaagatcctgaaggacgccggattggaacatctcagattccacgatctccggcacaccttcgccaccacagctctccagaatggcgtggacgtgaaaacagtgtcctccatgctagggcactttgacgccggtttcaccctccgcacctacacccacgcaacaaggcaaaagcaggatgaggcaacccagaccatgggcagcttcatggaacaggtcatgtaagacagagagaaaaatgccggacgggaaggcaaatcttcccgtccggcactcttgtgtccgttatttcctttccgcgtgtgggtcacggtgtgggtcaacccgctgccccacattttgacccacacgaaaaagtccacattcgcaacaaaaaaacacctgaaatccgaagatttcaggtatttgttggagctgctgggcggattcgaaccgccgacctcatccttaccaaggatgcgctctacctactgagctacagcagcataaaatggcgacccggaacgggctcgaaccgtcgacctctagcgtgacaggctagcgttctaaccaactgaactaccgggccattttgtaggctcgtcctattataagcaaatacatcctgccttctaaagattccaatggcaggagcagaagaattcgaaccctcggcatgcggttttgggatggctacaaagagcaacgttcctctactgccccaaacacttaccaatccatagcagttcgctcttcacaattctgacgttttcttgatgctgtcatcctttgggacaacgcatccgccgcacagaacaataaggattatactttacgccgcagcttttgtcaatcctttttttgatttttgagacatttttttaatgtctccattatccagcagacagacagctgccttgaggcacctttgcagcaggtgtgttttgtcgcttcacaattctactgattttggagtcccaagggaagctgtgttttcgccgtttccctttttcttttgccaacaaaaattttacactaaccagaccaaatctctgaaatttccagcgccaaggatgaccgtagcgcacagacatggaaaaagccgcccctcaaaaaccaaggcgcataaaacaatggaaagccctttcctcggggaacttcaaacctatgagaaagagccatactggcgccctcgatggatgcctccttccggagatggccgatagcctgctgatctgcatggaaagtatggtgaaccaaggccagcgtctacaaagaggccacctgggtcaagaagctgaaaaacacgctgaatatccagttccaccagtccattgcagagcacttctcctgggctggtctggaaaattctgaaataccgggagagctacagccatatgaatcacgctttggacaagagggatgccaccagcgcggatatcctgctagatattattgtgaagctctggagttgctgcagtccattttcttttcacccgcacctcggccgcaagagaaaacaccgccaggaacggtgttttttctgtcactcttcaaattgaaaaaacgctctgccatcatgtcagagaacggcaggtcccccgctggaccaggctgggcatcaaaatctggtgcacataaccctgggtccccttttcgatcttgtccagcagcatatccaccgcctggacggccatttcctttttcggctgctcaatggtggtaaggtcgatgcgcggcagcgcagtggaggggatgttgtcaaatccgatgagggacagatcccccgggatgcggatatggagctcgtcagccgccttcaggatgcccagtgcgttggagtccgtagaggcaaagatcgctgtatagtcgatgggctttgcaaacagctccttgaccatctgatatccattctcgatggaggaccgggcaaagtcgctgtgatggagcctgggttccagcccgaattgccggcaggcccgcagatagccctccgcccggagctgatgggtagtggagttccggcaaccgaagtacaggatctcccggtgtcccagtccgtagagatactccacccccagataggcgcctcggctgttgtccacagatacgtagctctggggctgatcccgcagattctcgctgagaaacaccgcagggatctgctccagcagcggggcgatcttctcataggtggccggggactgggggacgatcaaaatcccgtccacccggcggcccagcagcagtttgaccaccatctcctcctgtttcaaatccggctctgagttgcacagcataatgttgtagcccctggcccgggcgctcatctccacataataggccagctgggacatgaactcattttcaatggccggcaccaccagtcccagcagatacgtctttttcatcaccatggagcgggccacgtagttccccgtgtaccccatctcgtcgcacaggcggacaatccgctcccgcgtgctctttccgatctggttactccccgacagagcccgggataccgttgcataagagacaccggcggccttggccacatccttcagtgtcacgttcttcatgatctctgtcctttccatcggtccatgcctgagccggttccattgcgtaaacgttttcattttgacgccgttaaaatcaaacaaatcgtcaatttcacttttcttattgaacagcatatagaattatatcaaacttgtcaatatctccgaaaaaattatcattatagtgatttctccaaatctgccgaagattctttggcgggcgccgacttgacaaatgacagacggatatcctaaaataaaatcaagaaaaccgcaaacgtttacattcttcagctgtccgtttacagaagctctcctgcccactgtgaatggcggcctgaaacataggggaggtcttttgatgtctgtatccaatcacggcggtgcccagctggcagaggccgtccggcatgcctatgccgcagggcaggacgactatcatctggagcccatggtgctgactgagcgcggcgttcccgtcggccgcatccgggatcacgacgcggtggtgttctgctgccgccggggtgagcgggagatcgagctgacggaactgttcacggcggacgacttccgggccgtggagcgccggaagctgaaggatctgtacttcgctatcctgacactgtatcacgacaagttcaagcatctgcccgtcgcctttgcgccggaacacgtggtaaaacctttggcccaggtcctctccgaggccggaaaaacccagttccactgcgcggagtccgagaagttcgcccatgtgacctttttcttcaacggcggggaaaacacctccttccccggtgaagaggatgtgtgcgtcccctctcccaaaggcatcgactttgaccagaagccggagctctccctgccggaggtggcccggactgtggcgggcgccctggggaaatacgacttcatcgtcaccaacttcgccaacggtgatgtcatcggccacacccagaacaccgccgccaagctggatgcctgcggttacgtcagccgggccctggagcaggtggtggatgctgccctggcccaggactacgtggtggccatcactgcggaccacggcaatatcgaaaagctgtacaccgttgccgggaagccggacggctcccacaccaccaatctggtgccctttattctgatagactcccgtcaggaggaccccatctccctgcgggacggtgccctctgcgacgtggctcccacaatattagacgtcatgggccttcctcagcccctggagatgaccggccgctccctggcggagggacacgcctggagccgggggcggaggatgctcctcatcatctgcgacggctggggcctgggcgccggcgatgagggcgacgccatccacctggcccacaccccctactgggacgcccttttggaaaatcgctcctggtgccgcctgcaggcctcccgtgaatttgtgggcctgggggccggcaaggccggcaactccgaggccggacactccaatctgggggccggccggtgcgtcatgcaggacgacgtgcggctggacgcggcggtgcaggacggctccttcgcccgcaatccggtctttctggaggccatcgagcatgccagacggaaccatgcctccctgcatctgctggcctacctcacccataagtcctcccacgggtgcatcgactatcccctggccatctgtgagatggccaagaagcagggcctggaggaggtctacttccacatcatcttcgacggccgctccaccgaacccggctccgccccgcgctgctggcggagctggacagccgcctggaccagatcgggctggggcggatcgtggacggcgttggccggggcgtggtcctggaccgggacaagaattacgacaaggtaaagcgggcatacgatgccctgacagacggcctgggcgcctggtattcatgagcgccgacgctcggcccgcgcgggatgcgctcctcattccgcgcgggccctgtatttgtgatacagccgccaagggcgtgctgcgagattgtctgcacattggaaaagaggtgcgctatgaaaaccgtgttgggctatctgcgcccccatgccgggcgggtcgccgccggtgccgccatcaaattcaccgcagcggtcctggagctgatcctccccctcctgctggcagaagtcatcgacgagctggtgcccgccggcgacactgccgccatctggcggaccggcggctggatgtcgctgctggctcttggggcggtgggctgcaatattaccgccaaccggatggccgcctgggtctccatggagatgacccgggtactgcgccaggatctctaccgccggatccagggactctcctgcacccaggcagaccaattctcaccctcctccctggtgtcccgcctcaccaatgacacctacaatgtccaccagatgtttgacaaggtccagcggggcggcatccgggcccccatgctggtgttgggcggattgatactgacctttctgctggagccctctctggcgctggtgcagctggcggtgagccttctcacctttctcaccattacgctggtgacccggcgggggatcccccactacaccagagctcaggcggctgtggacacggtggtgcgcatcctacgggagaacgccgccggggtgcgggtggtaaaggccctcgcctgtcaggtcagggagcgggatcgctttgacacagccaaccaggcccagcggcaggcagaggcgcaggccgggcaggtcatggcgctggcaaaccccataaccgatctgctgctgaacgccgggctcatcctggtagtcctggtgggggccctgcgggtcaacgcgggactgatgcccccggggcagatcgtcgcctttatgacctacttcactctgatccaaagcgccacactggggctttccaaggtgttcgtgaaggtcagcaagggcgccgcatccgcccgccggatccaggaggtcctgctggccccggagcagcagcggcaaacagctcccctgcctgctggcggcggttttctgggcatggaccgcgtcacattctcctatcagggtgccaagccggatgtggaggaggcgtccttcctcctgcgccaaggcgggatgctgggaatcctggggcccaccggcagcggcaagagcacactgaccgccctgctgctgcggctgtatgacgcagaccggggcgtggtctgggtgggcggcatggatgtaaaagcccaggatcgccgggcactccagagccgcttcggcgtggtctttcaaagcgacgacctgatccgcggcaccgtctatgaaaacatctccttcctgcgaaatctcccacggccagcggtgggagccgccgcccggacggcccaggcgtggccctttatctcccagctgcctcagggtctggacaccccgctggacctgggcggcgccaacctctccggcggccagcgccagcggctgctgatcgcccgggccctggcggaccggccggagatcctgatactggacaatgccgacagcgccctggattactccacagccgccgcgctgcggcaggcgctgcggcgggatttcccctgcactaccctggtgataatctccgagcgggtgtccgccgtgcgtgaagcggactgcattctggtcctggaaaacggccgcatcgacgcccagggctgccatgacgcgctgatggcctcctgccggcgctatcagcgcatggccaagctccagatgggaggtgatgtcggatgaaacgacatctgtttcgccggatgggccggttcctgcggccccaggcgccgtccctagcaggggctgcggcgctggccgctctgtccggtctgctggcgctgctggtgcctctcgtggcgggctgggcggtggaggccatcgggactgggccgggggctgcggacctgaccgcggtgctgcggtactgtgccgcaggtctcggagccgctgtcctgtccgctgtttgcagctacggcgcctccgccgccctggtgcgggtggggcagaccgtatcctacacattgcggaaggcagcttttcagcaaatcactcagctaccggtccggtattttgacacccacccggcgggggatctgatcagccgggtctgctatgatgtggacacggtcaacgccgccctgtccactgatctgctccagatcggcaccagcctgctgacggtcattggctcctttgtgatgctgctgatgctctcccccctgctctccggcgtgtttttcctgaccgtgccgctctccgtcctgctgacgcggctccagatgaagcatatccatcccctgttccgccgccgctcccaggagctgggggccttgaatagctttgcggaggagcgggtcagctgccagcgggccattcgggtctacggcgtcgaggcggcagatcttcggcagttcgccgagaaaaacgacgccgcctccgagacgtactacaaggccgactgcgccagcacggccctggggccctccgtcaacttcatcaacaacctctccctggcggcggtcagtgtctttggtgccctgctgtacttaggcggcggactgtccctgggggcgctgtcctcctttgtgctgtactcccgcaaattctccggtcctatccgggagacggcggaactcctcagcgacctgcaggcctccgtggccgcggcggagcgggttctggatctgctggaccagccggcagaggatggcgacttgccgggcgcccgggagccatgcaagctctccggcgccatctccttccgccatgtggacttcggctatgaccccgcccacccggtgctgcgggacttcagcgcggacatccccgccggcagcatggtggccgtggtggggcccaccggggccggcaagaccaccctggtctccctcctgctgcgattctatacaccccagagcggcacgatcaccattgacggactgcccctccagcagtacacccgggacggcctccggcgtcgcttggccatcgtcttgcaggacggctggctgtgcggcggcaccatcgcggaaaacatcgcctacggcgtgccgggcgctacccgcgcccagatcgaggccgccgccaaggcagcctgtatccattcctttctctcctccctgccggatggatatgataccgcactcactgacagcggcgccggcctctccaagggccagcggcagctgctggcccttgcccgctgcttcctctccaatgcggacatcgtgatcttggacgaggccacctcggacgtggacccggagaccgaggagcagatcagcgccgccctggagcggctgcggagggggcgcacctgtttcctcatcgcccaccgtctggccacagtgcgcacggcggaccgcatcctggtactgcaggacggccggatcgccgagcagggcactcaccagcagctgctggatgccggcggcatctatcgggtcctatacgatgcccagttctcctgacagcccccggatttcatgacaacacggagaggcgccccggccattcagccggggcgcctctccgcaagaaagagaaaaaagtaaagtgagcaaattaaatgagtggttatgcgccgggggcgggggccagctctggattgatctggtccagccaagtcaccaggtccatcagtgttccgataaccttgtccggctgtgccgcatccgcggccacgtgcacatccttctgctccgacaggaaggaacggatctgcacggccttggcaaagcccacctgcttggggccgatgatgtccctggagaccgtgtcgcccacatagacgcacatttccggctttgcctgcatttgccgcagggcgatccggaagatctccggatggggtttgcgataaccggtgacgctggagaccgttacatcctccataaagccgcggatgccgtagtcctccagcacgcggaacacattgtacagcgaggcgttgttggagataacgcccaggtggtagccccggctcttcagggcctgcagcatctctgccgcgccgtcgcggagctcccggtggtagaaggtgacctcccacaggttggccagctcctcggtgatgggcagcagcttttcccggtcaaaggcaaagtcccgaagataccagtccggccaaatctcctccggctttttctccagcatattcccctcgctccactgcttataggcctttacgccgtccgtgatccgcttccagaacacatcgtccgggcagccgggctccaggccgttggcccgcaggacctccagcagcctgcggcaggtcgcccgctgggtgtcctcgttgtaccaaatatcctccagagttccgcccatatcaaataaaacggttgtcagcatcaggaatcctcatcctttccgtgtgtattccgccggcggtggcagccggcatcctctccgtcctcaaacaacagcatggcatcctcctggggagaccgccggggccgctcttcagcagccggggcagcaggatgcgctttgggggcggcatcagccttggtcccggccgcctcccgcatctcctcctgcagagtcttctgcacaggcagaggatgggtctttctcagcttgagatagaccggccaagccaccgcgtttccgatcagggccggtgccacaccatacagggtaatcagctgcaccatggttgcccgctggtctgtatccagcatccaggctgcgaagtagaacatcaccagaaccaccgccagccccacaaacccgaacagcgccacccgcttgtcccgcagaaggaacagcaggctgccgattgccgtccccgccaatgcgatgatcagcgtgtgcacggcgttggtggctgcagtgctgggcagcgtaagctgccggtacagcggctctgccagcagggtatacagaaccccgtagatgcagaggtccagcagggtggcgaaaaagcctgcaatggcaatggggctcttccgccggtgattcttgtcaatgaatagattcatgcgcatatctccttatctgagagggccggaatggagagccggcggacggattcccgtccgccggccgtgtgaagcagccaggatcgccgaagtgctgttatccgagcatctgccagaagtcacggacggtcatgaactccgtgtagatggaattgggatcgaacggggaaacgttcatctcctcataggggacagagccctcagcgggttcaatgtcgtcccggacaggccagccgcccagggtgttgaagggctcgtagccgctggtatcgccatcaatgccgcccatcatgaagcggatcagcagtttggcggcagcgggatgctcacagccttccaccacgtacagggtgttgatggcgggtatgccggtggtgggatacaggttcacgggagccaggacccagccgttatcctcgttcttgcgcagcttggaggaggcgcagaaaccaatggggggatcggactggccgggggtgccgacagcctcggcaacctcgtcagaagcggaggtgaagatcggctcattctcacgcaggcgcttcaggaactcgtagccggcgttggcgcagccctcagagagcaccagctcctcgccatacagttcctcataggcggcagccagctgatccggggtatcacccacgcagaagccggtaatccaggagccccagcccacattgttcaggggatcctgcatcaggatcttgcccttccattggggctcggtcacctgccagatgttggtgacaggggaaccgtcaggataagcctcagcattgtagaacagctgggtcagctcaatgtacagaggggtttgcgtctctgtcaggctgggatcaatatgggcgaggatgtcggcaggctgatatatgtaaaaaatcttgttttgcacatactcattgtacagggagccgtcctcgtccttgatatggaccacatccgccacatactggccggcctcgtgctcacgggtgaccttgtccagcaggtcgttggtagagatatcaaagggcgtgcaggtgatttcggggtacttgtccatgaaggcctccgccaccttggtgcagcgggaggagatggagtacagggtgacctcgccgccctcggcgatggcctgctcatagagctcctcatccgtctcgtccgtggcggtgatgttggcggtttcctcccaggaggtggcgccggcatcctccgcctcatcatccgtgccgccgcagccggtcacagtaaacagcatgacagcagccaacagggcgctcaatagtttcttgtgcttcaacatggttcttttcctcctttaatcattcttcctcaaatcgctctcttttatcgcaacggctgacgccgcaggatactccgggatcgctcggatgatggaaacgcgcattagcgggagtacttgatcaggcgtttggtagaggcgtcgaacacattgaccttcttgggcgggtaggagagatagaccgtctcatcgccggcgtaatgggtggagcccagctcctttacagtaatcagcttctcaccgacccggacggagaccagggtctcggaaccggcgggcattccggcgtatacacgggcctccacctgcgcggcgtcggtcttctcacgggaaatggtgatctgctccgggcggatgcccagaaccagcttcaggtcgccggaggcgggcgcttcaggcgtcatgtcctcccgggagaactccaggcggcccatgacaccgtcaaccgacagcccggacgcgccggcggtgcccgaggcctccacgaagttgatgctggggttgccgatgaagtccgccgtatagagatcgcaggggttgtcgtacagctccagaggcttatccacctggaccagctcgccctcacggaacagggcgatcttggtggacatggtcagcgcctccacctggtcgtgggtgacgtagatgatggtgctgccggtgtcgtggtgcaggcgcttcagctcggaccgcatatccacgcggagcttggcgtccaggttggacaggggctcgtcaagcaggagcagccggggctctgacacgatggcgcgggcgatggccacacgctgctgctggccgccggagagctcggtgggataccgcttggcgtactggccgatctgcatccgttccagggcgctggcaaccattttttcgatctccgcggaggggatctttttgatcttcaggccgaaggacacgttctcaaagacagtcatgtggggccacagcgcgtaggactggaacaccaggttcaggttccgctgggacgggggcgcgtagtacgcctccgccgcgttgacgatctccttgccgtccatgtagatgaagccgttctggggcttttccaggccggacaccacccgcagcgttgtggtcttgccgcagccggaggggcccagcagcgtcatgaagtcgccgtcctcgatggtcaggttcagatctttcagaacgtggttcttgccatagaatttatcgatatgttttaattcaatcttgctcatgttcgtcgtctcctctcagttctctgtccgcgtcagccggccatgctcttggccaggtccgccttgccggagagattcgctatcgcatacaccaggaacacaatagagaacatcacaatcgccacgcagtcagatgcctgcggcgagttgccgttctggtaccggaacgccaggtacggcagcgtggaggtggtgggggtcatgatcaggatgatcagatccagctccttcatgatggaaacgaagatcagcatgaagccggagatgaagccgcctttggacagggggaacacaatcttcacgaaccggcggaagaatccggcgccctcgatggtggccgcctcttccagctcaccgctgatctgcagcatgttggaggtgccggcccgcgccgcgaagggcagatgcttcaccacggacaccagcgtcagcagagcgaaggtgccgtacagggcgggcaccagggtcacgccgaagatctgctggggctgggagaacatggacagatagatgccgccgaacgccacggacgggatcagataggggatgaacaccagctgttccaccagcttgccgtggagcctgccgcggcccttggcggtgatgtagccaagcagctggccgaagatggtgccgaacacgccgttcacgagagtcaggcgcagggagttgaacagggagttgatgaactcgtcattcttgaagatgcccggcagcccctccataatctggggattggattcgccaatccagtagtggagggtaaagttgtccagggagtagataccttccttgagcatgaagctctccatgaccaagatgacgattggcatgatgatgcccactgcgaagaacacgaacagcgccgcagtgataaccggcctgcctaccttcccaaggccgatcagggtggatcggccgcccttgccgccgatggtggcgtaggacttgcgggagccgatcagcttctggttgacgaacacggcgatggaggcaataataatcatcaggatcgccatggcaaatccggtctgcgtatcccgggagttgatattcatgtacagctggctggacagggtgtagtactgcaccggagagcccagatagttgatggttccgaaggtgccgatggccttggagaaagtcaggatcacggccgacaggatggccggcagcaccaaaggcagagtgatcttccgcaggatcatggccttgcccgcgccctggatctcacccatctcctccagctcggagttgatggagttcagtgctgaggataccagcaggtatgtataggcgtaataatgaagggtcagcacgatgatgatggcgacagggccataggccagccactccggcacatccagccccagggaggccatgaagccgggcgcgccgcccaacctcgctgtcttgaacatggacagccacgcctgggatttgcaccaggaggggatcatgtaggggataatcaccgccagggagaaaaacttcttgaagggcagatccgaccggaccatcagccaggccagaatggaacccagcaggatggcgcacacggacacgcagacgccgatgaccagggagttgatcaacggcttgatcagcatggtccaggacagctcactggccagcagccgctgccagtagtacagggtaaagtcgccggccttgccgccgcccacagcccggatgtcccgctgggccagctcaaaggtggtggcgatcatgtccagcagcggcaggacgatcagatagaccagcagaacgacggcgatcagtacgatgatgttgtagggatttgtcaccactgccttgatctgattcttcagccgccggctttttgaatacgtttgctcttgcggtttcatcttcctcttgcaccctctctcctcagttcctcttgttgtttgtgttaaatatcgcaaacgttttcgtttctatgcgatttcaaatttaacattcgttcatacttttgtcaagaactataccgcatatttaataaagtatccaataaaattattctaattttggttatttcgttgtcttgcaaaattcaaatccgaacggctcacacaaacgttttccgggatttgaaaaaaatgatgcgttcacttcagcggcggcagcaactccagcaattccgggaacgtatcgatcactgcatccggccgcgtctcctccgtgaactccacaggatgcttcttctccggagaccggaagatgatgttgcagccgattcccgcagccttggcccctggaatatctcgcttgatgttgtccgccacggagacgcagtctgccagatccacccccagttcccgggctgcaatgtggtaaatctccgcgccaggcttgcgcagatggcacacggaggagagcaccacactgccaaaatacggggccagccgatcctcctccagccagtcgggcacctcgtgctcgccaatcaggttggacacaatgcccagcttgtatccccgctcgtgcaaggttcggatcacttctgccccgccgtccaccaccacacgccggcctttggactggcggtactcaaaggacagctcatggcagacctgggcaatgcgcttctggtcatagtccggcagcagccaccggcaccagagctcccggtcgccagcctccttgttctctcccagggcccagcggcgataggactcgtagcggtcttctaccaactgatagaagtcctccacctgcagcggtgcccccgccagctccgtcatcttcctgcgggcatggcgcatatagggctcatcctccagcgcaatccgaagggtgccgcccaagtcgaacaggacggccctgtaccttttttcgttcatccttcctccttatccgcagacaggcagatgctctctggatccgctgcccactcgtcttatgcaccgaatgcaaacgttttcgattttctgtctttattctatggtagattacttttctctgtcaaggggaggaaccgccaaagacactcccctgtttttgccattttgaccaaaagtccagaaatcgcagttttatattgacttttctgacaaaactctatatatttcaatgcagaagtgtacttctctttcttgcgggcggagttgcgtcgcagaatcgaaaacgtttgcattttcgaggactttttggtggaaaaaccggcttttgtctgccctgttccaaggcgctgcccccctcccgcagtttgagcgtgacagtctgaatcatggaaagaaggcattttatggacggatacctgtttgacccccacactcacacggcggaaaccagcaagtgcggccacctgccggcggcggaggtggtggaccgctatgtgcgccatggcttctccggactggttgtgacggaccatctccacccggagtacctctcccggattgacacagaccacgattggaataaggtcatagaccactatctctccggctaccgcgcctccaaacagcggggcgacgaggtgggcttccaagtgctgctcggcgcggaactgcgatttcccgaaaatgacaacgactacctggtgtacggcattgatgaggcgtggctgcgatccaacccctacgtttgctgcatgagcgcccgggagttcttccagaaattccatgaccaggtgcttattatccacgcccacccctatcgggacggcaacactacggtgtttgaggacgcgattcacggtacggagatcatcaacggcaatccccggcacgacaactacaatgaccgggctctagagctggcccgccgccatccagaatactaccgcctggcgggatccgacacccatcagagtggggacgaggcccgggccggcgtgatcctgccagagaggcccgccgactcctttgcctacaagaccttgattgggcagcaccgtttccacctctggagcccggagttccagtcctttgtggacacggatgaggaaatgcggaaggagaaacagaaatgagccagtttgactctctgatcatcggcgaggtggcacaggacaccaatgtggactatgacggcaccaccgtccatgccgtgggcggcgccgtgtactactccggcttcgccgccgccaacaccggccacaagaccgcggtgctccccaaggcggacacggcccaggtggacctggccgccgccttcgccccagccccaaatgtgaccgtctatcccctgcacagcaggacctcctttgtcacaaaaaacgtctaccacaccccggaccgggagcggcgcacctccaccgtggacagcgtcatcgaaccataccgcaccgaggaggtgccggatatcgatgcggcgatctggcatctggcgggcctggcagcgggcgacattcccaacgagatgatcccctttgccgcccggcacgccatggtggccatcgacgtgcaaaccatgctgcgctgggtggagaacggcggcatggtctatcacgactgggcagagaaaaaggagctgctgccgtatgtccgatttctcaagaccgacgcggcggaggcggagattctgacaggtctcaccgaccgggctgaggccgccagacagctttaccagtggggcgccaaggagattctcatcacccataacacggaggtgctggtctacgatggtcgggagatctacacatgccccatccgggccagaaacctctccggccggaccgggcggggcgacaccacctttgccggctacatcaatgagcggctgactgctgacatccccaccgccctccgcttcgccaccgccttagtgtccctgaagatggagacccccggccccttcaccggcacccgggcggatgtagatgcctatctgaaggaattctactgagcgccatttccgtatccatctcccgaaatcaccaagacggctgccaacccggcagccgtcttttcagctctgctccgaagaaggagcaaccaacttctgcaaatgtgactatcttcaccccagatgataccatgaagttcaaagccgaggctctccgcacctggggaaacaggacacgcatctaccagaatgcgggatgtgcctctcaacgaggcctcggtggacgccatcctggatctgagagcggagtggtacttcgtagaagacgcgtcgatcatcgctgacgagcacgaaggctatacccgaacggtactaccgcatcctgaaggcggctgagctgaagcagcgggggctccatactctgcttcgccgccaatctggttaacagcatcaaacaaccggatgggacgctcggctccctttccccccggcaggtggccgtcctccttagacaatccgcctcggagattacggagctctactatgtgaaaaaggacgcctccgcttgacagggatcacgacaggattcgatctctgaggtatgcgaaaaaagaactcccctggccagcaggcaactggccaggggagcaaaattttaaagctaaaatgatgctgtagcagacagaaacaagactttcatgggtcggggaaatcaatatgcagccgcgcatttatggagccgcatattaaagggcgcaaaatcaaagggcgtcgggtggcaccccggcgccctttggcttttggcagacattgcgtgaaactgcagttctcaaacctcgcgagaggggagcggccgcatctgcctgttctgggtggtttgtattcaggctatgcggctgaggatccgtgagaggcctcgcctcaaaagacgccctgctccatcatggcctcagccacccgcttgaagccggcgatgttggcgcccgccaccaggttgtagcccaggccgtactcctccgcagcctccacgctcatctggtagatggtgttcatgatccggtgcagctgcgcgtccacctcttccgccgtccacaccagccgctcgctgttctgcgccatctccagtgcgctggtggccacgccgcctgcgttcaccgccttgctgggcgccacgatcatcccgggctgctccatcaagaaccgcagcgcgtcgttggtggtgggcatgttcgccacctcaatgtagtacttcacgccgttggccgcgatctgcttcgcctgctccatgtgcacgtcgttctgcatggccgagggcatcaccacatccgccttcaccccccaaggcttctcaccggggaagaactccacgccgaacttctccgcgtagtcctgtacccggttgcggccgctggagcgcatctccaccagatacgcaatcttctcctccgtggctacgccgtccggatcatagatatatccgtccgggccggacaatgtcaccaccttggcccccagctgcgttgccttcctgcagatgccccaggtcacgttgccgaagcccgcgcaggcgatggtcttgcccgcgatccgctccccctcgtgctccagcacgttctggagatagtataccgcgccgtagcccgtggcctccggccggatcaggctgccgccgtaagagaaccccttgcccgtcagcacaccgttctcccaggcccccttcagccgccggtactcgccgaagagatacccgatctcccggccgcccacgcccatgtccccggcaggcacgtccacgtccggcccgatgtaccggtacagcgcctgcatgtacgcctggcagaaccgcatgatctccgcgtccgacttccccgccgggtcgaagtccgcgccgcccttgccgccgccgatgggcagacccgtcagagagttcttgaagatctgctcaaagcccaggaatttgatgatgccgggatatacgttggcctggaaccgcaggccgcccttgtagggccccagcgcgccgttgaactggcaccggtagccgatgttcgtgtgccactgaccctgatcgtcctcccaggagacccggaaggtgaacatccgctccggctccaccatccggttcagcaggtccaccttctcatactccgggtgcttctcgatcaccggctccagagaggagaacacctcctccaccgtctgcacgaattccggctcgttgccgtgcttcttcttcacgttctcgatcacgctggtgagatatgtgttcatggctgttttaatcctcctttattttatcaagaacagttctcaaccttgcgaattaggaaaacggacaatccttcctttcgaaaatgtaaggcgtatatttccccaagcttctgtgggctcaaaggccctttacaaaagcctccattcgccgcaacccctcctggatgcttttctcgctggtggcgtaagacaggcggataaatccctcgccgccttggccaaagcctgtgccgggcacgacaaccacatgttgctcctgcagcagccgcatcgcaaactcctgggatttcagtccagtcccggaaatattggcaaatgcatagaatgcgccctttggccacagacagctaatcttttcaatattattgagtcccttgacaatcagctcccggcgacggcgatactggcacttcatttcttccacgcagtcctggtttcctgtaagcgccgccaccccgccccactgaacgccttcattcacagaagaaagtacgttttccagaagctttgtcataacagtcgtgacttctaaaggcgcagcgctccaagctaaacgaaagcctgtcatagcatatttcttagaaaagccgtctaccactactgtacgctctttcatccccggaaaactggcaatactggtataaggctccccatcccaaatcagttcgcgataaatctcgtctgtaagaacatacaggtttcgctcttttgccagatccgaaatttggcgcaggttttccgcgctggctacaccgccggttggattggaaggcgaattgatcaagataactttggtctttggcgtaatcgcattccgcaggtcgtcaatctcgtacatgaatccgttttcttccttgactttcacaggaatggggacggcacctacctgcatcatcaggcctttgtaattggcccacccggggtctggcagcaacacctcatctccgatatccaacatggcggtgcaggcaagattcagcagactgattgcgccggccccaatcaggatctcactcggctgataatccagcccccgcgcctgataagtcgcagccacggccttccgcaaagcaggaatgccggtattgggcgtatagtgggtttccccgcgccgaaaggaggctaccgtcgcatcaacgacatgctgcggggccgtaaagtccggttcccccaacgcgaagctgatgacatccttcattcctgcttgcatagcgaacatttctcgaattagagagccaggaatctgcttgcttttcttcgaaactattgacatatctatattttcctttctgtcctttcgagttccattattcggtctaggcatatccatgcgcatgttgtcctcggtatacacaggagagatgctcccgacagcccgacgcaccaggacgacattccagaaggctctcctcacatccacccagcgggcgggtagagcactgtcccgccagcgtccaaatggcgtctacatctctgtccgccccccatacttgaatgagagaaccgccttccgctccttgaatgccgccttttccaatcaggactgatttcacaggcgccagcatagagatggcatccaactccgtaatcacttctccagctaatggaagcagtccgcaggccatcccatgggaggctgagacatgttttctttgagacaacgctactgctgatgagatatttccggacgttagtttttctgtccctgctgctatgaggacccggattccttcggtctcaatggcactaagcgccgcgccatagctaccgcccccgggactccccgcaagaagagccgctccgccgctgcaatcaattaaattcgctccagtaaccaatacacattccggtccaaacttcaaaaaggcatctctctccaagccatccagggaccgtatgccctgccggctgagaagtaccgtatgtggattggagctctctttcaaattggccacagccccgcggcatgttacccggccgcacagcctcaggtgcgatcccgtcagaatggcgctgagacaggaggttgtggttccgcccttcaaaattaatgttccattttccagtgcggtctgaacttccggccgcctggaaattgcctcggcaatcagccactttgcggcattcacactcaaaaaaatctgaacacgtttcaaattttttacctcatgttgtcaaaaccctcagcaaaacttctgttgtcgaaatcatgtcttcaaacaggatatgttccttgcacccgtgaacttcctgcatacctaccccgatattgatagcagccagaccattttcaaccagccatgtgatgtcgctgccgccgagcgtctgttcaatgaccggtgtgatgccaatactgcgcatggcctcacaggtcttttcaataatgggtgcggtaaccggaatacaaaacgcattagagacccggttctcggttttgcagaattttgcgccccaggcctgacaaaccttttccacgtggccgcaaatattctgtacaatcgactggagctcctcctcctcgtaggagcgaacctccacatcaaaatccgctttctctgggacgatgttggtttgcccggggcagagcaaattggccacgttgacaacgctaatttccgacacacggccgcattcgatgccggaaatacactctgccacagctttcagagcatggatgcctttttcaggagaaacgcccgcatgtgcgctctttccttggatagaaaagtgaatcttcatatatgcagccgcctggttcaccaagtgccccacatcctcattgtctaaaacaatggcctctttgctgataattttgctgtagtcagcgtatttggagccgagaatgccgttttcctcacagatagtcagcagaaattcgatcggccgatgcggcaagcctttctcaacaatcgtctggacagcctccatagctgcagcaataccggctttatcatcactgcctagaattgtggttccatcgctgtatatgaccccatctctcaaaataggagaaatcccatagcccggggccacagtgtccatatgggcgcaaagaagcagaggagcgcctgtacctggtagaatcgcatggagattccacccgttggagccgaacatttccccaatctcctgtcgttcccaatggagtccaagagaagtcaattcttcctccatcatgatgcaaaattctcgctcttgataggtctcgctggcacaggtaacatattggagaaagcgttgcagcaaacgttctttgttcatactaacatcctctcattcattccgcaaaatgcgtctctttgtcattggcaaactgatcgtaacatgctataatatgttaaattgtccacgaaacctttctgctagtagtcacccgaacacccgcagatgtataacagctcaggaggggatgtgaaatggctcttaccgtcgccgatgtattaaagctgaagccctttgccaccggcaaggtaatcgcaggggaaaacggtgttacccgtaaagttgagcacgtcagcgtgatggaggtggatatcacagaatggttttcctcagagctggttcgaggtgcctctttggaaatttcctcaatgtatgccctggtcgaccatcctgagcggcaggtggaagccatccgacgcctgaacaagagcggagctgccgggcttgtcctctgttatgtgggaacagttttaaaggacgtctctcaggagctcattgatgtgtgcaacgaactggattttcctttgattgtgatgttttctctggtaggctacaaagagattatccgtgctgtatccgatgcgcttttggggcttgataatcaaaagctgcgagacgccattgacatctatgaatatgtgacggaactgctgatggagagcaggaacaactcctcgctggtcatgtctctggaacatatgctggaaaagcgcgtgatgtactttgatcaaaatgccgagcccatctacatctccggcttttccagagcgcgaatccagatggttgaacggtatatcaaaaatcatttctcagagtttttgctccaccattccagccagaccatttcctgcccgggatagatgagcagctctatctgcgcccaatctataataaggcattctattttggcactttggtaattgtagggtgcaggttttctgatttggataaaattgcgattgcccagatctgcaatgccttgagcatttccagtctaagccagatcagcatcagccagcagcaagaaaaactgcgcacagattttatacgggatctgttgaccatccatctatctgaagaggatatctttcgccgcagcacagcgattcactgcgacatctcccaggtagagggatgtattgtgctggatatctgcaatttcaagcagttgatcaaacaatacagcgaggagaaaatcgcttctttaaaatgtgacttttatgagttggtgcaaagcgaactcagcgctttaggggacaggagtatctgctgtgtactgagtgataaggtcgtaatcctccatattcagacgcccaagcaaacgattttgcaggtagcccgttctctccagcgggtccttaagcgcaaaaatattgaggtttccgccggaattggatatcgctgtaaaagtgtgcgggatatccaaaccagctacgaaaccgcaagactggcgctgcaaattgcaacctctggttttgcgccctctacctgtgtggacagcgaggagtttcccgcctatatgatgctgcttcagacttatcaggccgaccctggactggtcccgcagttgattgaccgtcttttagcccctgtccggcaatatgatcaaacccgaaacggtgccttggaagagaccttccgcgcacttttgcgctgcgacatgaattacaatctggttgccgaacagttgttttttcataaaaacaccgttcttcagcgcaagcaaaaaattgtatctctgtataaggaggatccttttcagttgccattgcgccgccagtttgaattcgcgtttattttagagggcttatacgtgcggaagggttcctctgattccggcgatatttaaagattcccggttgtcgatgcaactcattcgacaaccgggaatcttcttcacggcagatactcaggcgttttcttggcgcaggacttccgccatcggaacatggtcaaactcaaaatcatagtagcgggggttcataacggagaatggctttcctgaattgtattgctcccgggcgggcacgcctacgatgctgacaaagtcgccaacttcaattaccgtgttggtcaacggatggcaggtctttgtatccacgcattgaacgatatcagggctggtaatccatggcttgccgttcttccacatcacatgatactcattctcgaaccacagcttataggtattgccagcaaactcgtccacaccttccagctccagcgtgccatagtacaggccgtcgatggtctttccctcttttttgaccatcttcgtttttgccagaacataaccgccggcggcttccgctgccgcggccacggggtccttccctacctcgttggcctcccgaatggtcttgccaatcttgaagcactggctgagcgtgccggggaccagcgcgtccttgacttccttaccggacatgatgtagcacgcgtgggctaccataccgaagccggagtcagccagcatcttgccgttgcgctcgatcatctggctgttcacacagcgcgtcaagatattggtgtcgccatagccgttgacgatggccaccggcagacagggcttatccataacaagcggcagcgcctgggtcatctgcggataggcacgccccgcggcgtccgcgtcgatatacgtcaggcccttgtcgaatccaacggacatgggcatgcagctgtttccgccgcccagctcaatggcaaacaatgcgctgatcttcttcccggtgtattcctccaggacatccagggacttggaaagcatctcctggggagaatagggcggatcaacgggcacgccgttgcgcttttgcttggcaatgatctcatctgttttgggggcgatagagcccatcagaaaaacagacgcataggtgtcatcatccttcagatcgtcaaagctggttacctggaggggcttccccttctccaacacctctgtcagggctacgatgccggcctcagggtcaccgccgccaccgcagccgaagaagcagcagccagtggcaaaatcctgaatatcctgctttgtctttaactcaaacgcaaccataaaagcgctcctcactttctaacttatcatataactgttgcgtaggattaccgatctgtataaatgctgatgtctggcatgtacatatccatgcccagcgcataatacttcagttcaccggtttcattgtaatagtccgcaacaggccaatcaatgtatgtggactgatacgcatagggattcgccatatcggcgactggtgccgacgcacacagctctgccatcacatagtcctgcagttccatggcagcggcatttctctcatctgtatccagaatggtgacagcagtgtccaaccgttcatccagctccggcgtggaaacccaggtgggattctcaaacgttccctgggttgcgctgccaaatagagtgcgcatcacagaagcggcgtcattgacagagggcgtgatgttgcaggtagatacattcggcgcactatccgggttggaaatctgctcctgataggtcagccagggacccttccggatattcatagtgatgccgacttgcgcgcagttggcctgcagggacagcatcattttttccagagctggagccgaatccaggaggaaacactccagttcaatgtcctgatatgtgtccgcatacctcgactgggccaagtattccttcgcctgctcaatatcatagttataagtcgtacagctgtcgttatggccgttgattgcggaggagaccggtccgacgctacgctctgcgccgtagaatacagggccgaggaaactctcatagtccagcaggcaggacaacgccttgcggtagttcagatcgtctgtgggggcggcctgcgtattaaagaagatatactgggtgcaggcccatgtggtaaatgccagttcaaccccctcaatctcatccaacgcctcatagttttccggagcaaaccacggagaagaaatttccagctcctgattggccatcatagtctgctgggtactgggctcagtcagataaatagcctgaaactgctcgggggcattttcgcggccctcccagcccatatgccagtcagggaagcggcttgctaggaaataatcagaatgcaccatctctgtagctgtgtagggaccagagccagcgtcgttgtccagcagccaggccatggcatagtcgccatattcgccgtaggtgccgtcatccacaatattggccatgaccgtctcttcgtccaaaatgtacaggtgccagatgatgcccataaaagaacccagaggctcggcgagaacaaatctcactgtgtaatcatcgtccgccacgcattcctccacggtgtcgaagaggtacgcaaatccctgtccaatcgttttgaagcggttaaaggaaaacacgacatcggaagctgtcaggtcgtttccgctgtggaacttcacgccctccttcagatggaaggtatactccaatccatccgggctggcctcccaatcggtggccaggttcggcgtttcatctggataggtgagattatcatacagattttcaacacatacgctgccgaccaagtccgtaatcaccgccggatcaatcttgggcgtactgtccgcagagaagcggatgatgctggggcgggtgccgtctcccgtctgagcgtctgccgggtcgcccgcagtgtctccgccgcacccggacagcaggccgacgcagctcaaaagggccaggaccaatgcaagaattcgtttcataatcttcctcctttattacagtcgtataatttacacctccggcggcagccgaaaagcgtgtacagagagaatgccctatttatctatcaaatgacagcggaccgtatgccctggctccacctcccgcatcaccgggtcttcttttgtgcaccgctcgcatttgtaggggcagcgggtgtgaaaactgcagcccgtcggcacattgaccggggacggaatttcccccacgcactccactgcctttggtttgatggtctcgtcctcctccgaaactaccgggatcgaggacagcagcatctgtgtataggggtgcagcggatttcgatagaatgtctcggtgggggcgatttcgcaaatcttgcccagatacatgatcgccacccggttggagacgttccgcattacgcccatgtcgtgggtgatgaacatataggtgaggttctgctccttcttcagcttgatgagcatgttgatgatcttggcctggatggagacatccagagaagaggttggctcatccagaatgatgaacttgggattgcagcacagtgcccgggctatggagaccagctgcttctcaccgccaccgatggagttaggcgacttgtacatgaagtcggcgggaagttctaccatctccagaatctcaaggatcttatcgtcaatctcgttcttgggaactaccttatgtaccttcagcggcagactcagaatgctgcgcacatcctgataggggtttagggaagagccgggatcctgaaagacgatctgcgcctcgcggcggaatttcatgctcctcttccgcttggtctcctttgtgaaaacctcgccctcaaagtcgatctcgccgcccgtcatcccgtacatgcccataacggtataggcaatcgtgctctttccggagccggactcacccacaaggcccatgacatccccatggttgatggtcaggtccacgccatccactgcccgcacaaaccggtcttttcccacaggaaagtactgcttcaggttctttaatgtcaataactcattcgacatggccgtctcccctctccttggcaggtcccttgtcctcatagaggaagcaggacaccgcatgattttctgcagccatgtatgtgcccggtttttcctgcttgcagcgttctgtgcaatgagggcagcggttgaagaaccggcacccctttggtggatttacataacttggaatgtagccgtaaatgccggctgaaattccgccgccggtaagccgcggcacacatgccagcaagccttgggtatacggatgcagcggatttttgaaaagctcagcggtatcgcagttctccacgatgtttcccgcgtacatgacgtaaatacggtccaccagctctcggaccacgcccagcgagtgggtgatcatgatcaaagagcgcttttcctcctccaccagcctgcgcagaagcttgtggatctgcccctgaaccgtgacgtccagcgcggtaccgggctcatccgcgatcagcagctgacggggcgtcagaagcgatgtggcaatgcagattctctgccgcataccgcctgataactggtgcgggtacgagttcagaatgcggtccgggtccggaatcatcacgctgtcaatcgccttccgggccgcgtccagcattccctttttgtcatgcttatcaaactgcccggagtatttcagcacatccatcatctgctggccgatcgtgaatacagggttcaatgccgccatgggcgactgggagatcatggagatcttgcggcgccgtagatccaaaagcgccttcgcatccatggccaggatatcctcaccgccaaacaggagcttagacccctctcccaccttgataccccgttcgtccagtgtccgcatgaccattttcatcgttgtggtctttccgcagccggactcgcccacaaggccgattttttcgcccttacccacgtacagattgatgtgatccaccacttcggcaaagccccgatatgtcttgtaccatacagagagatcctgaatatccagcaatttttcatccatcactgtttccccctgtccagcatatcccgaattccgtcgcccaagaagttaaagccaaggatgacaaacacaatggcaagggcggggaatgccgtcatccaccaatagtccggcatgtaagtcgacccttcggagatcatcgtgccgaaggacggcgtggggggctgttcgcccaggccgataaaactcagggatgcgcccagcagaataacccagccaacgtccagcgccatctttgtcaaaaccggggacaagcagttgggcagcagttccttgaagagaatatgcgccctgctcgcgccgacaagttcggcattcttgataaagtactccttgctatatccggtcgccatactatagaccagtcttgtataccatggccaccaggaaagggtcaccgcaatcatggtattcgtcatgttcggctccatgagggaggctatggtcatggccagcaccagtgacggcaacgccaggaaaatatccgtcatgcgcatgatgacggtgtccacccaggtgtggtgataatatcccgccagaagacccagaaacgtccccacgggaacagagatcgccagtaccaccactgccattttcagggcgccgcggaatccgaaaatcacgcgggagaggatgtcccgccccgtcacatccgtcccgaaccaaaacgtggcgttaggtgccacgccggcattggccagatccacataggcgccggcatgttccggaaacggcgccacatacggggcaaaaattgcgaaaatcagggagatcaccacaatggccaatcccaccatggacaatttgttgctgcggaagttataccagtaaatacagaaattctcccgggtggatggcttcagaaagccttttttctttttggctgcatccatctttacaggtcacctcccagtcggatcctcgggtccaccatagcattgatcacgtccacgatcagattgaccaccaagaacgtcgctccgattacaagcaccactgcacagacagagttcaagtccttggtaatcatcgcgtttgccccgtatttggaaaatcccggccagttgaatacctgttccaccatgaatgcgttgcccaccatagatgcaatgtccatgcccataactgtgatcactgacgtgctggagggcttgaacagatatcgattcatcaggactttttccggcaggccataactgcgggaaacgcacatgtactcctttcccatattgtccgtcagcgcggaacgcatcagccgtgcatcctggaacataccgcccagagaaagggcaaacgcgggcaacagcaaatggaggaacgcgtcccacgccgtggaaaattgtccctgcaccagggcatccagcacatagaagcccgtgatggtgtccggcggtgccaccccggtactcaatcgcccaagcgttgggattacctgccatagatttccgaatatgaccagcagcacaattgccaccacgaaggacggcaccgcgattccgatataggagaacacacggatgatactgtccagaatgccatctcggtgccgggccgccgcccgtcccaaaatcagggaaccgcccaccatgaacagggcggaccagaaaatcagttcaaaggtcgccggaagcagctgcttcatgtcctctgtaacagagcggcgggtggacagggaaataccgaaatcgccatgaagcacatcccgaaaccacaggatatactgcaccggcagtggcttatctaaatacatctgttttgacaggttatcgactgcctcctgggtcgcgtgctgccccaaagccaaccgtgccggatctcccggaataatgcgggaaagacagaaaatgacaattgaaactcctatcagaacaaatactccctgcaagagtcttttcagtatatagcgaagcacttttccaacccctttcctattgcagagccatttggatcacgtcagttcccaatcgacttttcgtgtcttttcttccaccggccaataggcgtatttgctctgggaaacgcccatcaacgcacaagaaagtgcgtcgtaaagagccgctctgaatggctcaatgaccggaatatcgatcccgtgttcctgcagttttctcttcacgccatccaccgccgtgctcatgcaggtacagccaaaaatcaccgcccgggcgccatcctgccgtaccgcttggttggcagccgccgcagccttgtccacgagagcctcctcactgttgtgaagttccaccactggcatgtgaatgaccggaatggatgccaactgccgttcaaagcaataacaccggatattttcacgaatacagcggtcggcattatccagaatcccgatcacagaaaagcgcccggccattctggcggccagtgaacagctggactggcatgcccccatcaccggaattcggaccaattcccggcattcagagagtgcgggatccagaaagcaatccaggacaatggcgtcgaagccatctttttccccctgctgcaccagctttaatatgtaaggcgcagccagagccgaatcgtaaaagcattcaatagactcacttccaccctcaacgatcctgctctcaagctccaccagtcccccggtttcctccttcagcgcggcggccagcgcctgacggtcctttacagagactgcgatcccctctgtataaatgtccggaacaatgttgaggattctgatctttctcatagatacctccttttcgcatcatctaattttggtctactgccgtgttatttatgttgaaaattatacgattggattttgtgtagaaatatacatttttcttgggcattattttcatcataacacacagcccttatgcaaatctcacatatatctagatgtccagaacagcagaagggatcagggaatctctgttgtaagcatctatggtctttccttgacatcttccttaagaagctgagggtagatttttaacagtaatttgcccaactttaagtggagcgtctggagcccctgctgtatctcatcggccagacgatagggacaggcggtagaacaccgctatgaagccgccggaacaactgcgttggcgtctattgcaaaggcccattcccattgtggaaattccctggcattcctcgctgatggagagacggtcgtgcaactcactgaacacggttctggcgggagaaatcaggagctggcattggccgctgcagaaggaattgcaggactggacaatgtcttaattttttccgttgcttctgatggaaccgatgggtccactgatgcggtcggcggaattgtagataggttcacgtggagccgactggaaaaggctggcctctccattcaccagatactagctaataacagcgcctatcatgctttgaaacaagtagatgggttgattcgaacgggtcccatagggaccaatgtaaatgatgttttggtgctcctgattcaacaagctgaaaggacatgaacaagcgactctgttgtgattacgtatcgtgggcagcaagtatcggtgccgaaggctttctggagcgggatcggaagcgggaacaggcgtggtaaaaacaggaggaaaggcatagcatatcctctcgaaataaaacctgaggagaacaagcagggactgaacgcccgctgaaagattgaagcagtccgtctctccaaagataaggttacagggtgttaagccctaattattggtgcttgaaagagcgtccagcacatacctatttagtccaacacgaggttgagcctactcacctccacgtgctctgtagtacacctgcttcctcaagcctattttaacaaatttcaacttgctgtatgagaggcacctatgtttcatccattttggtgccttggagcgtagcggaaaggaatggtcacacctatggaatttaaagaagatattcaaaagagacgcacaacatttcagtttactggtacaccggtaacagcggaacagattaagtggattattcgggccggaatcacggctccctcttttgaccacaaacgcaagtggaatcttattgcggtcacgtcggagatggcaaagcgaaaagtcaccgactacattgaccctctgccctgtaaggacactcctcctgaaaatccagtgcaggagatgattcagatcgctttccccaagcaaaaaagtatgtgcggaagctggatgtgtccttctgccgctgtataagcgggaagcacagatcatgatggaggtcgggcccagaaaactgatggactttgtcgagatctggtgcgtcatcgaaaacgtcttcctagctaccacagacgagagccttggccgctccatgcgaattcccacagaggaacagccgaggaagattttggaagtgctgggctgtccatcaggataccagcttccttgcatcatcggaatcggccatattgcagaaggggctgaatatcggagcaggtttatccggatttgacggagtgtgttcattggaaaattggtgaaaatacctcagcggaatttttatatgttgcttttgtgtccggactggtagtctatccatttgtcctacacagtgcttagataatttactgctacctatcttatttcctataaatcgccggggcaccaagattctccttcctggtgccttggcgatttctccatataaaagcctgtgaaaactgagctggattcccgccagcaacgtgatgaaggcatcgccttgacatatgcccggcgggaggaaataatcgacacttgtgaaatctccaacagcaccaacgcagaaactgcgccgcatcagcaatgaaaaggccagctggattaggagttggatcaatcaatccggccgtttcttttcctcggtttcatattcattctctcagattcttgcgttgtccgtcatcgcttcattttcttttgcccacttgctggattacgcatatcgctgtcagaggaagtatctgattggcaaaagcactgaatcaagatgcttgaatctgtgtaattctctgaattttcttcttgtctccgctcaactccctgttttgttgcttgtacatgatgagaggttgtgtatttctcaaatgcgggggaggcatcgtgaaagaatcggactgcaaacgctatgaggatctgccgctgtttctgaacacggcaacagtggcaaaacttcttggtgtgtcacaatccagctgctacgagctcatgcacgagccgggcttcccggtactaaagatcggcagcaggatggtcgtacccaaggagcagttcacccgctgggggatgagcatacgggaggtggaaaatcaggtacggaagtggaacctacttctctctgcccgacgagatcttcctgctgggtctgaatgccggtgaactggcagtgtatagttacctcaaacggtgcgaggaccgtaagacgcatcagtgctggcccaacgattgggagatctgtgggtatgagtgaaaacacagtgcgcaagtacatccgccaactggaggaacaggagctcctcttcacagaaccgacagagattatgaccagggccggtcagaagcgcaataggaatctgcaccacaccctccgtcccacccaggaggtggtaaatgcgtactatgaccgtcagttggcgcggctggaaatcacagtaatgcgtcagaaggcagcagcggcccaggccggcatgtgaccgcctgggccgctgtgtgcggaggtgacagcgtgggcagggtacaggcattccgtgtggggactgtgtgccgcagctcccgttattgattaacgcctaaatgggcaggtggaccgaggggggaatcgtgcaggataaaggccggggtcgccggtagcacctccggccggtcacaactgcccgcagtgcgggcagttgcgagggttttgcggtgtatcaaaagtgggatcaaaatccgacctgtgctgtcacctctgcggtcacgaacccggaacacctactgtcacaacaaaaaaacagaggtcaagccccagaaaggagcagtttatgggcagaaaagagaaattcgccttctacctctctccggagaagaaggccatcttagagcggcggtaccgggaggattgaagccgcagtctcaccgccttcatcgaacgagccgtcgacttctatctggactgcttcagcgccaacaacgcaggactctttctcccggcctccatcaaatcctatgtggacggccgactgggacagttggagaatcggatgtcctctctgctgtacaagcaggcagtggagcaggatatggtagccggcattctggcggatgcctatcaattcaacgaagatgatctccagccacgccgcacggagagtatcaacaaggcacctgagtaaaagtgagtttgaaacggtgctgtctgcctcagattgtgtcaggcatcccgtggaggatgctgtacttcagaacttccaaccgggatgtctacgaaaaactgttgatggtcttggaattggggtaaatgtcaaatataaggggcaataaaggagtgtgggcgtggctaaagccacacccacactcctttatatcctcctgtatttgacatttaccattttgtgtgtgggactctctcttatgccagtttcttcactctattttcttaaaacaacagggttataactttatagagaatgaacaggaacatgatcacaaagccaccgcaacggctcactacacgtctccaagaccgctgttcctgacagcggtccgcatggataagtgccgccagaaaaactccgctgcaggccagcaacaccgcccatagaaatgttgcattgggcagagcagtttcccatgccagcaacaggacgcagggaacaagaatcaaaattgaggcggcgaattctgccagctttctagcgacataagcattcacctttttccctccttcagcattttcttggaaaagagatttcctgttgcttatgaatgctgtgcggcagtcttccgcaacagttgccgcccagcatccgtcagtccggctttcaatcgtccttggccgaagactctcaccagtcccagatcggagagatgttcagaaatggcactcagttccatcatgtagatggaatgctttccagagatctcgctcatcgtggcatcgtccttttcgatccaatgcatgaactggattgcctgactgtccactccatatacggcaatggtcttcaactctgtttcactcatattggcacaggccgcggcatcgcctttttccgtcagggaaaaatatagctgggcaatcagccgctgtccctttcgcttgacatagccgctcttctccagagaatccagcgcattgtggatatggccagcctgtagctgatgctcattgcagaagcgcgtcatactggtgataatagcgccggcatttgaatatccacgcttgatggttttcagaatctccatctgggcttcattgggtcccgtcttttcatccacaggaacaacggtatccttcttggtcagaaagcttacaatcaccagcgtgaggaaagaggccgggaaaatcagccagaggctgttcatctgctgggagttggtggttaggatatcccagtacagtacaatggccatagacacggcaacagaggcaatcgctcccttctggttgcctacccgcaatagccaggagtccagatagtagacaaacaatggggcacccactcctgtgccgaaagcgaagagatagctcagcccgccgctccagaagatggcgaagaataccgaggccattccatagatgatggtgccccacttcgcccactgcaggagctttttggtatcacgaattttcaggaaatactgcgccacatcacggactagctgattcacgccagataccaggtagatgtcgcaggtggacatggtggccgccatcaggccggccataatacaggccgccaaaggaatcggcaaaatattcatcaaggctccgaacgcctgactggaatccgtcagtcccggcagaagctgccgggcatagcagccgataaaagctccgacaacaccggtaaagtaggcgatgatcacagtccacatccagccgcgcttgcagttctttagactgcgagtacccgccgcccgggcccaatacggagactggttcagcagagactggtgcatcatcaggaaggtgatgacagacggtgccacaaatttgatgacagggagcgtaccgaaaggaagggagaggaaagcatctggtagcgccactgcatcaggcaacccgtacttcgcgatcaaaaaggtcggcaggatgatgaactggataatgaatacccaggagaactgaatcacatctgtggcggtagccgcccagatgccgccgaataccacgtaggccgtgaccaccacacctaccaacagcatcgcgattttggggtcaatgcccagcgcaccgccgatggtctcgccgcatcccacatactgccagcccagaatggctagggaggcaaaaaggattacaatggtgatggccatgcggccgccctttccgtagcggtattcaaaccactcggtgggcgtcagggcgccggatgtccgccagaagccggcccagcacagccaagccaccagagctcctgtgccccagcccaagtagaaccacatgccgcccataccgaacatatagccgtacatgataatggagggcagataaccgccagagatcagaatggaaccgttgccgatggctgtcatgaaggccgtaaactcccggccgccaaccatgaattccgtctcatccttggtggtcttttttccgatgatccagctcagtagcatcattgcgcatacgtagaccacagtaattaggatcatccacatttgtgaagtcatacagatacctccttacgtatgaacatttcaccagcattggcattatccaaagtatttcttgttgacgcaccacatgtcgtgtccagtgaggaaccacttaggctcttcccgctccgccagcatcataatcttgttgaagctgtcatagcaggcatagtggtcatagataacgctgttgaggataaagggtccccagttctcaggtgcaggtgtgatatccacaatttcgccgccaatgacctccatcttatccatctgcgggaagagagactgggcaatatggggcatatcgccggtaatcacatacttgccctctgcagtctggacctgaatggccataccgcctagggagtgaccgggaaccttgaacaggcggattccgtttcccatgtcaaaatcgccatcaatcatgcgtacattcttgatctgtgcaaggtcgcctggcgtgcgcgggtcataatctcttcgaatcttctgtgtgggcagggggtgaagcatattgtaatactcatccctctgaaacaggtgctgtgaattgggaaacagcagcatgccgcctgcatgatcgttgtggaggtgggtatacatgacaatctcaatatcgtcgggtgtcagaccttctcctttcagcgcatccaaaacaaattgattgccgccctccgccggactgtccgcccaagctttgccatcgacaatgttgtcctgatgaacaccagtatccacaagaatatttctaccatccttttgcaggagatacccactatagacaaagggatatctcgtttggtcaagcccaccatcaaataaggacttatagcaggacagcgtaccatagtgcaggcaggtgattttccagttgttgttcgccatattttccatcctttctactccaaatgtgagccggtgtttcattcactccggcatatgccattgccggacgccctcaaaatagggagcctgcttccggtatcggaagtcatcctcgtccttttcagaccaatcatagagtccttggcccgccttttgccccgtgcgcccggaggcaatccccaccagagtggtcttttggatactttttgtgtcgcagagatctggatacacattcagtgcaatggccctttccaactcaaagccaaccgcatcgtaatattccaaaagccctatagaagcgtaccgcattccaactgcatacttaattgcccgatcaatgtccgccgcagtggtgatcccctgctcaatcaaataaatcgactcgcggaacaatgcctgggcaaaacgatttactaaaaatcctgggacactgcgattcagcatgaccacttgtcgattcaggtccttcagcagcgtacagacctgattcagagtttcctctgatgtctctgtatgccggacaacttccaccaggggaagcatgtggacgggttggaatggatgcgcaatcaggaatcttgcgggattttcaattttttctgccaggattgcagcatcaatggaagatgttgtggataccacaatgatatctctgccgcagacctcggtaatgatgctatacacacgctgcttaatgttcacatcttctgaaaccgcttcaaaaacaatgtcacagtctctaagggctgagacatcattggtgatcgtcaccaggtccatcgcagcacgccgattggccgcagtcgccaatttctgggctataaggtcattccagttttgcagcatggtgtttctgcagcgggatagtccctcctctgaatgtccaattacaacggtggaatatccattgccagatgtcagcgtcgcttggcacgcgccgatcgttcctgccccataaattgcaatttttttccccatagaacgcctcctctcgttttgaaacagcattgtcagggccttgacgccttactacctaagcaaaaactatgccaagaatggaaaatacaaaaattctccattcttggcatagtgtgttgtaaaactgtacaactcccctgtttgctgagtctttaaagaagttgatacttatgaagttttttatacaggattgtgcgggaaattcccaaattttgtgctaccaaggtcttattaccgtgaaactcctgtaaaacttgcatcaggatatccttttccagctcatccgtccgttggcgcagcaagcgcggcggcgcggcagagtttaatgtttttgtttcatatgcgtgatgtttaaaatagtccgaaaaatacttccactccagcgtctcaaaccaggcaagattcatggcccgttctaaaacattctgcagttcacggacatttcccggccagtcatattccatcagacgctgaacggcttcctgagagattcccgggatttggaggttcagccggaaattcaactgcttcatcagccaatcgatcagcaaaggaatatcctcgcttcgctctctcaatggcggaacatgaatgcataccacattcagtcggaaatagagatcactgcgaaatttttcttccatcacaagcttttcaagaggcgtgtttgtcgatgaaataatccgcgtgtcaatggggattgtggcagaagatcccacacgctcaatctcccgctcctgcaatacccggaggagtttcggctgcagggcaagcggcatctgattaatctcgtccaaaaagaggctgccgccatttgccatctcaaattttccaatcctgcctcccctgctggcccccgtaaaggctccctccacataaccaaagaattctgattccagaagttcagcggggatcgctgcacagttcactttgatcaggcgattcttacatctgggactgagttcatgaatggcatgcgctaccagctccttgccgctgccagtttctccatcaatcaaaaccgtggaagaggaccgcgctgcacagacaatttcgtgcttcattttcagaatctccgggctgtttccgacaatccgatccaagggatctacggtattttgctgaaaggactgaagcagttgcatctggcgattcagttcttccagcagtgaaacgacatgagagggaaccgccatggaaacatcctcattctttcgaatcatatagacgagacaaccctccaacttgttttcgtgaaacagcggtgtgtaggagcaatagaccggtacctcctccccagtttgactgttcaggagaatcgcatccccagacacaaatttttgagtctttaatacctcatccacgcgggaaagccgaacaacatcccggacatatcggccctttacctgctcaaatgtatacccggtaagtgatgaccatcgctggttgacataggcataccgtccctctgcatccgcgacaatgagtccctccagttcatcggcaattctttgcatcaatgcttttgttgaaatttcatgtagactctggaccatcaagggaatttctcctcctttcgatttccgttattttaacgaaaattcacacagctccccggttctgttttggaagaattattgtaagccaattttaacacaagttgtaaacactgtaaataaatacttacaattatgtaaaattgttacagtacctaaaaaattctcccaaaaataaaaagctggaaagtaaaaattgctgcactggtactgcttacgctgtggcaacatggctatctatcatataatctctctggcttttcaaaatacttagccatccgtttctgccgtattctcaggaacggcctgccgctaatcagataaccatagggtgttcctatattcatttctaaaattcttcccccttctctccaccgttttcattgattctttgctaagtataacatcggcacagtcggaggtttccttttacagtcatagtcaccggctaagccgatggcttgagtaggccctatgaaggcctattaccggcaagcgtctcaaggcgcactgaaatttattttgcttgcatcacttgccttacagcctgtaaacgggtaatcatcgttctaatagtagctttctattattggaagtctcatgccagcggctcacttcgctcgatgcttgaagctaaagctcctctctcgattgacaactttgatgcctgcgactacatcttcctgaatcacgcgcacccggaccactacctgaacatcaaggagtttgtggacaaattccaccccccgatctctgtggacagcctgtatgcggcggaactctcccgcaccataggcattgagctggcatacattttcccggtggaccggacacaactaccgcttcccggacttccgcctagatgtctactacgggagccacaacgcgctgacagggatcggcttcgacaactataccttcacggaaaagctgtttggcatcaagggcacggaggcgctggatcaatacggcagcctgttcaacacgaatttcatgttgaccctgcccaatggctacaaggtcggctctgtcgccggaatcgacaatctgaaccaagcggaggcgtggcggaacaatcagccaaatctcctgctgcaccagcgtatggtgtacacaaagccggaggactatgcccaagaagtgatcgatctgggcgggcagatggggattgtggaggcgtgaggtgcctctgcaagaaggcgggagcgatgctcccgccttttcaaaactgtctgtccttatttctgccacttatcagattttgatatgcgatacaaagaaaaagcattggttgcaagcccacttgcgatacgctgatcaagcagaatgacggcaccttcttcgactggccggtattctgcctttagctccgtgaactaaacgtactgaaagttacggtgtaggctatcaagaatattttgtctaaattttgatttcaagattgttagaaatgcagaaaacgaataagctcctacaggattttcggaggcccggcagttaccttgccgggtctcgctgtatcctcggaagtaaggagcgataagtgggagtgagatcattgggaccctcggaacagagacaagcgatatggggctacttatgcggcgcacggtttggtacaacgaaacaactggcaaatcgatttggagtttgtgagcggacgattcgaagcgccctggtcatgttatcctgtacatatcccatcgagacttcctttggtctctatggaggaattcgcgtctcagattggcaccacccagctcaaacgcaactgtcggcagctcaaatatcgcctttgctaagagtccgaatggatctggatggtgaggatttgaaagtgatgaactctatcctcatccaatttgcttttcctggaagttactaaaatgagtcctgcttcccgcgaaaaagcactacagctagaatgaaaatttcaaaaagagccgggacaaatataccagaagtgaaggatgccagagagacccactccgtggatgagttcctgcgtttgatccatccaaatgttgtctgtgaggcttcgaaaagggatgctgattgaaaaaatttcgagacccggcaaaaaggctgccgggtcagctgatagactgaaagcacaaacattggatcgagatctactggcaggaggtgcgtatgaaagagtcccattacaaaagctatgatgatctgcctctgtttctcaatgcaaaaacagtggcaaaggttctgggcgtgtcaccatctagcggttacgagttgctgcacgacccgggcttcccggtgatgcgcgtcgggaaccggatggtggtgcccaaggagcagttcatacagtgggtgagcgatcacacaggaggtggaacatgaagtatagaaattaccgagacgttttctttctgcccaacgagttgtttcagctgggactggactatggagaactggcggtctgcagtttcctgaaacggtgcaaaaatcgaaagacacatcagtgctggcacagcatcaaaacgattggccatgcggtaggcatgagtgagaacacggtgcgcaagtgcatccgccgactggaggagcggtagcttatctccaccgagcctaccgaggtcaccaccaaagccagtggtcggcacagcggaaattttctgttcaccctccggccaattcaggatgtgatcgccgaatcctacgcctgacagctggagagggtagaattggctgcagagcggcaacgggtcgccaagtccttccaggagctggagactccagcgtgaccgcctgtgagccgctgtgtgccccgtttgcgtgagctcttgcccctcccagtggcttcggacggatttggcccgttttgggggttttacgagggacgaaaaaaggaacaggataaacgtcggggtcaccgatggtgcctccagccagtcacatctgcccgcagtgcgggcagttacaggaattttccggatgaccgaaagtggggtcaaaacagccagcgggaatcacgtttgcggtcactatcccagaacacctactgtcacaacaaaaaacagggagcacgccctggaaaagagccgcttttgagcagaaaagagaagttttccctgtacctgacgctggagaaaaaagcaattccggaacgccggtatcaggaggacgggggccgcagcctcaccgccttcatcgagaatgccgtagatttctatcttgactatctcagcgccaataatgctggtctattcctccccgcctccgtcaagtcctgcctggatggacgctgggacagctggaagatcgcctgtcttccctgccttcaaacaggcagtggagcaggacatggtggctggcatcctcgctgacatctaccagttcagcgaggaggatctccgccgttgccgtgcgcagagcgtcatcaatgtgaagaaggccaatggccgcgtctcgttggaacagcgggcgcgggagttctgggagtaggacgatgagtggcaggattgatcgtgaaaagcccctacctgaagtgtggcgaggatcattccgtcagtggatacctccactacatcgggaccagggagcgggtggagctgctcccagatgaccgtccgccaaccagaaagcaggagcagttcatcacgaaactggtgaaatattttccgaatgtcaaagagctgaatgaattctccggctacgaaaccaagcctaccaaggccaatgcctcctcgctcatcactagggcgctggaggaaaactggtcagcactacagaaaacagagggctacatgaagtacatcgccactcgtcccagggcggagcggctgggggcatggtctgtttagtgatgaggacggcgtggacttggcaaaggccatggaagaactggaccactacactggaaaggtatggacgcacatcctctccctgaaacggaaggatgcaacacggctggactgcgacaatgctaaagtgtggatgaatctgctccggacaaaccacaacgacatcgccgccatgaacattccgccgaatcacttccgatggtacgccgctttccatgatgaggtgaagcacccccacgtacacatgatggcgtggtcggcggtacccggtgaggcctatctcaccagagagggcatccgcaagatcaagtccacgctcaccaaccagatcttccgtcaggagatgctccacacctacgagcagaaatctcagtcgcaggatgaagtggtgcgggaagctcggcagaccatccgaaaactcccccaggagatggctcggactatctgtactcgccctgagatcgagcagaagatggcgcagttggctgaacaactggaaacggttaagggaaagaagtcctacggctatctctccaagccggtgaagaaaaccgtggatgaggtggtggacaagctggaggaactgcaggtagttcgtgcgtgctatgaccagtggtgcaggctccagggtgaggtggaaagctgctaccacgacaagcccagagagaagaaaagctgtcccaggagaaggagttctggcagatcaagaacgccgtcattcaggaggcggaacgcattcggctggaggagatcaccttcgagaatgatgacttggctgagtgcgatgagtcggaacaggtgcagagcgagtcctctgcctgctgggaactacggcaaatcatccgggacgcgccctttcctctgaaagatcagaacgatgcggcagaggaattggaacggctggcggaacagagtgatctccatgcgcagtacctgatgggtctactctaccgggatggccttctactgatcccggacagccagagcgcgaaatactggctcacccaggcggcaaagcagggattgccggaggcacagtacgctctggacaaactgctttctctgacgatcttgaagtctgtgattcggacgggggcatccgctgcttgaaagaagcagctgggaacgggaaccactttgccgcctaccggctgggcaagaagtatctcagcggcgaggttgtgtcaaaagatgcagtcagagtcacagagcgcctcacctagtcagcggaggcgggaaaccagtatgcccagtatatgctgggaaagttgtatctgactgggcagagtgttcagccggatcaggtccaggcaatagtgtggttcggcaggtccgctgagggaaatcagtacgcccagttctttctggagcggcacgatgatattcgaccgccctctgtcatgctggcagttacccgcctgctctaccacatgagccggagctttgaggactgctccctgcctcgatccagcactggtctgcgcatcgaccggaagcgccggcagaaactccaggcgaggcgtatcgctctgggccacaagccggatgaccatgaggatgagtagcatcaggatgaaatgacgatgaagggatggtgagctgcacgagaaaggaaaaaggcctcccgcaaatacgggaggcccggcagatcaagaggtgccttctcccactccgcccacatagaactcggccatatcgtccagccgcaggcaggccaggcgtcggtgtgccgccttcatgctgccacagccgcagtcgatgtcgaggatgccgtctccatgccagattgaaaagtcctcgtcgtgcccatccgtaaggaacaccgtgggcgtgtggccgacaatgcagatggtgtccggaaaggggcttctgttgtctggctccacccggccccagatgcgggtttcgtgcccctctcccggatacccgtgtaccagatgaaacctctgcccacccactgtcaggtccagatagcccggcaggccggcgaggaaacacaggatcccattccgctcttggtgcgtccggtgatagatcagctcccggtaagcagacgaacccgccgttcatccgccagaggtcccgggcgccgaactcgttattgggttccagggtcctcaggcacatctgcttgtggttgcccagaagcatggtcatattcgtcgcggctatgatcctccaaaaaatgtccccacccaaagtcccccggacgataacgcctcccagaatgtatagatggtcctcaccagagaatcggatcagctccagcatctgttcaagcttatccaactcgccgtggatgtccgatatacagcagattaccggccgcacctcctgcctgaaaagtgatacccgcattttaccatagaatgtctgcggatacaacggcggtgtccccccttcaaattttgcagggtagtatgcgatatacgcgtttcccaaatagaaactttctgataatagtcctaattcagggtggctattcttctgcgattgtgggattgtccgttgctgagaaagggaagctagaatatgcacactgtcacacgcccatcaggaaggtcaacaaggggattgtcagaatcgagcagagcgtggaggcaaagatgatctgcgatgcaaatatggcatcaccgccgtatttgtctgccaaaatggaagtcgtgctgcctgcgggcatccccgttatcagaatgcagacattgaccagcgttgaatccagcgggaacggctttagcaccagccagatcagcacgggaaagaacaccaaccgtaaacaggtgtaccatagcacggatttggagaatagagatcggattggcgcatccgcgagaattgtaccgatcacgatcatggaaagcggcactgtgcagccgctggttatgtcaatagcttcttctaagaaatttggaagtgagatcggagctaccatcaaaatcaggcccacaaataccgcgatgatgcagggatgccgcaccaattttcggaaggcatcttttttactgacatccgtaaatagggaaagacccgctgtccacatggtaaagcgaaggggaatttgaaatacggaagtatagatgacacccagatccccgaacatcagatgggcaatcggcagccctacaaagctggaattggaacagatcatgccataggacagcacacttttctggtttgccggataccggcggaacagcagcttgcttccgtaaatcgacagtacctgaatcccgatggagatacagacagccagaatgcagttgtgcacaaagccatcgggcagtgtgatcccacccataaaggacgctacgatattacaggggagaatcgcataaatcagaagatctgaaagggttttccgcccgttttcgcggatgatcttcaattttttcaccagcacacccaacaggatcagcagaaacagcgtctcctgcagggataacatctcccagaaaaaatccatctcgctccctcttctccgcaaagcttattccaataaaaattctacaatatattccgataggccataccatttttatccgaaatagggcgcagggtccggccctggggccggaccctgcacgaaaaaaggatcgtgtgtgtccgatggtagcaaatttggaatgcggtaccgtgcttacaggatttcgcagctgatttccttcagcttttcatctacccagggacggatgtaggtgccgtcccccagaatatgggccatgatgtcggcttctttcttctcaaccgcctcggtggcatccgccagctctgcggcgatggcgggatcaatgaacaacacaccgtcgtcatcgcccactacgatgtcgccgggacggacgagttttccaccaatcaccacggggacgttgatctcgccggggccgttcttataggggccgttgggggtggcggaccgggcgtagacgtggaagtcctccatagccgccagaccgccccggtcccggatggcaccgtcgcagacgatgcccttgatcccgcgggccttgcagtaggtggccatcagctcgccgaaaatggcccggtctgtgaagccgccggcatcaatgacgatgacatcaccgggctttgccaaatccatggcagcgtgaaacatcaggttatcgccctgagggacccggacggtgaaggccgtgcccagcagctgtcctttgtatccaatgggctcgatggccgcgtccactgcggcgatgcggcccatgttgtcatcgatgttggccaccggcatatctttgaaccgggtcaccagctccggggcgggccgctgaaaatcctttacgatcttgcatccgatagacatgatctcattcctccgatctcagataaatgtaaagccagtctctttattcagtacgtctcggtccgccacgcagcgggcggctactttacctgtagtcacggcggtggggaccagatcgcagaccatctggatctgggtcttcttgctgcccacgccatagctgccgcagtgggggttgacgatgacgttgtccagcgtcttcagcgggtcattttccggcagaggctcccgctccacggtgtccaggccggcgtacaggatctcgccattttgcagggcccagaccatatcgtcgttgtcgatgacggggcctcggctggtgttgatgatcatggcggtattcttcatctttttgaagacttctttgttgaacacgtgggtggtttccggggtcagcacgacatggatggagatgatgtcgctgcgggtgatcagctcctcaaaggacacgaactctacatccgggtactgagctttgacggcatcgctgatgtacggatcgcagctgatgacctttgtgccgaacccattgtggaagatatcgtggagatggcggcctgccaggccgaagccgtagagccccagagtcaactcccgcacatcagggggcagcaggtactgacatttgggccagttgcccttgcgcacctcccggtcatagtaggcggtgttgcggatcagccccatgatcatggcggtggccacgtcagccagctccttggcgcagaagccaggcaggttcaaaacgatcacgcccagctctgcggcggccgccaggtcgatgctgttgacgccggcgccaaaccgctggacgaacttcacctccggcagggtctccatcaccttgcgggtgatgggcgggttgccggtggccaggagcacctgggctccttggcagcccgcgatgatctcctcttctgtgggctccttctgacgagtcgcttccacctggtactccagcagctccatctggatcccggccgcctgataggctgccgccacacggtccagttcttggggtgtgacgctgccgtaatctttgtcaacgacaattgctctcataaatttgcctccttcaaaagtcgcttacagaggccagaaaatgggaatgaagatcatggatacgatgagaatgaccaccgtcagccccaggccggggcggaagaagtccatgaacttcaggttgcccggacggacgatcagggtgttggtgccgctgcccaccggggtcaggaacggagcggatgctgccacacagatggcgatggccacggcggtggtgttcatgccaaatgcctgcacgatgggaatgaacaacggggtgaccagcatggcacaggaggtgttcatcatggcattggtcagcagagttaccagaaccagaatgataaacagcaccagcaacttgttgggatgttcgcccagcaggtttaccgctgtatcggcgatcagggcgccggcaccgcttttgctcatgcctgtggagacagcgctcatgccggccacgataaatagagtggatagatcgatggatttataggcatcggactggctgatacagccggtcagcaccagaacaaaggccgcgaaggccgccaccagatacatagggaaggaatcactgtcgatggccatagccaccaggagcactgccaagatcaccaggcacagcccggcctttacggcgttgaattccacagccttattgctgccggtatattccgccagatattctctgtcagaggtgtcgccaggggtcaggaaccgctttccgatggtcaggaagaacacaatgccagcaatggagaccggaatgcccactttgcccagttcgaagaaggtcatagtgggaacgcccagatcctccagggctccgttgaccactacattgctggccgcgcccatcagtgtcaggttgcaaccaaagcttgcggcgaaggacatgggaatcagctgccgggagacggagacacctgcccgctggctgacgctgatgacgatgggaagcagcatagcgactacggctacgccgctgcacaccgcggagataattgtagccaccagcataaaggcgatcatgatgccgttttccgatgtacctgtgaatttgaccagaacatccgccatcttggcggcgatgcctgtgtggaagagggcggaaccaaccaccatcattgccgccaccaggacgatggtgctgccggaaaaggcgctgaacaattccgccgggtcaatgatcccacacaacaccaaaacactgccacccagcatagccaccagggccgcggggagcttctccgtcacaaaaaacacaaccataaccagcaggaccaatagcgtaatcactgcagggctcataggagttctcctttcttttctccattcatgtacggtgattttgcgaaagtgcaaaatccatattggtttttcttatcagacccttggtcctaaattttctttacataggcaagattgtagcaaaatatgcgcattttttgcttttctgtcatcattttaacgtctatacttgcttttgtcaaaggcaaaaggtaatataaagattataatgtcaacattatactagttgaggaggatcggatcatatatggtcttgcataactatgagtatttcgtagccatcgtagatgaggggagcctaacaaaagcagctgagcacctgtatgtctcccagccttcgctcagtcagtatctgaaaaggctggaggcgaatctgggcgtagaactgtttgatcgcagcgcctcgccgctccggctgacctataccggtgaacgctattatcaatacgtcctgcagatgatgaagctggatgaaaatatccgccgggaatttcaggacatcaaaaaccaaaccagcggacgcctccgattaggagtggcgctgtggcggggcgcttgcctgctgccggatgtattccccagctttcaccggcagtatccggacattcacatcgaactgactgaggggcgctccgtccaactggaaagcgcattgatgaacgataaaatcgaccttgcagtgatgaatctaccccgcacgctggattacagcaaactggtatcggaggtcgtttgcgaagaacggattctaatcgccgcccccacacaacacccttatgtgcagaacttacttgcagactgcccgacccttggaggctatcctgttgcctcgctggagctggtaacccatattcccctgatcctgacgaaacccggacagaatttgacccacgaggttaaacacgctcttgggaagagtcatattgagccagatctccttatggagacagccaatctgaccacagctattaatttgaccgctcagggcattgcctgcgcttttgtgccagaagagggtgcgaaagtctgccagcaccctggcgcagtgacttattttgcagtggattccccggatctggtatgggatttagcggccgtgtatcggaaggacacctatctgacgcgtctttcccagctgttcattgatgtcatgaaacagcagctccgacgagaataagcggtgttgaaaacggctgcatacggaaaaatttcacctgctcatacggggcaaaaagagcgttcagcatgccagcggctgccaaacgctctttttgcagggagagccccaaacccactttgtggctaaaggccgaaggataacggataaaaggtagtatatacattagagttttgacaaaaaacacgcaaggtattttggccccacaaataactcagaatttactgtgcagtaaacaataggatgtctgcggatacaacagtggtactccccccttttcaaattttgcggggaagtaaacaatatacgggcttcccaaatagaaactttctgataatagtcctcattcagggtggctattcttccgcagttgcggtattgtgtgttgctgagaaaaggcggccgtaatatgcagcgaaaactattggaaagcggaaacatcttcaaacgatcagacggccgctggaacggcgtggtctggtactcggatgagcagagttcaaagaaacgcaaatccttctgcgggaccagcaaacaagaggtcaaagataaaatcactgcctaccttgccgacttcgaccgccagctcacggcctcagatgagtccaaggcaaagtttgaggaaagcatgggcaagtggctccgggtattcaaatttccctctgtggagcgcggcacctacgaccggctggagtgcaccgccaagtatcagatctacccgatcctcggcggcaaggtggtgggtgacatcacctcggcagatatcaaagccctgctgaatcactggatgaatgagggctacgcctacaccacagtcaagaaggtctacaacatccttaccgactacttccgctacctgactcaacaggagtacatcccgaagaacccaatggctgcggctcccatgatcaagaagtcaaacttcatggctagccagggcaaggaggatctgccaaccttcgaaactgtgaccatcttcaccccggaggagatcacaaagttcaaggcggaggctgtcaggacctgggaaaacgggacgcccatctatcagcaggcggccgcctatacgctgatgctgaacaccggactccgcacaggcgaagccctcggactgctgaacagcgacatcgatctggagaaccgcgtcatccacctccagcggggcgtgaaagaggttttcaggcgggaaggcaccgaatccaccagcggccgggaggtgaagatcggcaagctgaagagcacctccagcaaacgggatgtgcccctcaatcaggcggcagtggacgccatcctgactctgagagcggagcgatacttcggagaggacagccctctcatctcggatgaacacggaggttatacccggccggtaaacttccggaaacgatactaccgcattctggaggcggctggactggagcagcggggactccatgccctccgacacaccttcgccaccaatctggtcaacggagtcaaacagccgaatggaaccatccgcgcgctctctccccggcaggtggccgacctcctcggccactccacctcagagatcacagaactctactacgtgaaaaaggatacctcccggctggcaggaatcacggcaggattcgatctctaaagcaccctccaaaaaacgcgcccctgaccagaaaccaactggccagggcgcaaaactttgatgctaaaatgatgctgtagcagacggaaacagtaaaaacggatgacgccagataccacattcagggcatcatttgagcgtcacccgcggtctcccgaaaatcattccctcgaaaaagtaacaaaaaaccccgataaatcggggttttcggaataaacaatggcaggggcagaaggattcgaaccctcggcacgcggttttggagaccgctgctctaccagctgagctatacccctatctcgcttgcggcactcccgtcaggcgatcaaccattctggtgggccttcagggattcgaacccgggaccggccggttatgagccagctgctctaaccaactgagctaaaggcccgtatcggcatttccttcaagagaagtattgccgccacgccgagtggcggcaatacttggctcccccagttggactcgaaccaacgacaccgcggttaacagccgcgtgctctaccgactgagctatggaggaatgtggcaggcccttgttaaaaacaagagcctgtgttggcgctacctatcttcccgggccgtcaccagccaagtattgtcagcaggaacgagcttaactgccgtgttcggaatgggaacgggtggaccctcgccctaatcagcaccaactctatgtcatccggtcttgccgaagaacaaactgtattatattgtatttcgcttcccttgtcaagaactttcgcccttgaaaagtctggtgacccgtaccggattcgaaccgatgttaacggcgtgagaggccgctgtcttaaccacttgaccaacgggccatggtgcaccttcacggactcgaaccggggacccactgattaagagtcagttgctctaccaactgagctaaaggtgcaaatcccttgagcatgcttccctgcaccctcaaaaccgaacaatgtgacgctgctttcaggctcgcctgctttctcgtaggtcaagccctcgggctattagtaccggtcagctccatacattactgcacttccacctccggcctatctaccaggtagtcttcctgggcccttaccctctttcgaggtgagagatctcatcttagggggagtttcacgcttagatgctttcagcgtttatctcgtccgtacttagctacccagctatgcccttggcaggacaactggtgcaccagaggtacgtccatcccggtcctctcgtactaaggacagctcccttcaaatctcttccgcccgcaacagatagggaccgaactgtctcacgacgttctgaacccagctcgcgtgccactttaatcggcgaacagccgaacccttgggaccgaattcagccccaggatgtgacgagccgacatcgaggtgccaaacctccccgtcgctgtggacgcttggggagatcagcctgttatccccagggtagcttttatccgttgagcgatggcatttccactcacataccaccggatcactaactccaactttcgttactgctcgacccgtcggtctcgcagttaggctggcttctacgtttacactcactgcacgatttccgtccgtgctgagccaacctttgagcgcctccgttactctttaggaggcgaccgccccagtcaaactgcccgcctaacagtgtcccccgaccggattcacggccgcaggttagaaattcagcaatccaagagtggtatcccaccggcggctccacaagagctgacgcccctgcttccaagcctcccacctatcctgtacatgggttaccgaattccagtattaagctgcagtaaagctccatggggtctttccgtctagttgcgggtaactggtatcttcaccagtactacaatttcgccgggcgggctgttgagacagtgcccaaatcattacgcctttcgtgcgggtcagaacttacctgacaaggaatttcgctaccttaggaccgttatagttacggccgccgtttaccggggcttcaattcaatgcttcgcttgcgctgacatctcctcttaaccttccggcaccgggcaggcgtcagcccatatacgtcatctttcgatttagcatagacctgtgtttttggtaaacagttgcttgggccttttcactgcggcctcttgcgaggctccccttattccgaagttacggggtcaacttgccgagttccttaacaacccttctcccgttggccttaggattctctcctcatctacctgtgtcggtttgcggtacgggcaccttagtatccatcagagcttttctcgcctctcagcatcgcggacttcgctactatattttcgctccctttcgcccgggtcaaccaacgcccgggttccgctatccaaaagtgtccctctgacttaaagttcggtggctacggaatttctaccgtatgtgcatcgactacgcctttcggcctcgccttagctcccggcttaccttgggcggacgaaccttccccaagaaaccttagattttcggccattatgattcccacataattctcgctactcattccggcattctcacttccatgcagtccaccgctgcttccgctgcgacttcaccccacatggaacgctcccctaccactgtcttacgacaatcctaagcttcggttagatgcttagccccgttacattttccgcgcagagtcactcgaccagtgagctattacgcactcttttaatgagtggctgcttctaagccaacatcctggttgttttcgcaactccacatcgttttccacttagcatctattcgggaccttagctgtaggtctgggctgtttcccttttgacaatgaaacttatctcacactgtctgactgctatgcatcaattagccggcattcttagtttgataggcgttggtaaccttatcggccccgctaccattcagtgctttacctccggtaatctaacataacgctagccctaaagctatttcggggagaaccagctatctccgagttcgattggaatttcaccgctacccacaagtcatccgccaccattgcaacgggggtcggttcggtcctccatggggtttcacccccacttcaacctgctcatgggtaggtcacccggtttcgggtctatggcaacgaactttacgccctattcagactcgctctcgcttcgcctccggcactgaatgccttaagctcgctcgttactataactcgccggaccgttctacaaaaagtacgccatcacacgttaacgtgctttgacagcttgtaagcacaaggtttcaggttctctttcactcccctcccggggtccttttcacctttccctcacggtactgctcctctatcggtcatcaggtagtatttaggcttggagggtggtcccccctgtttcccacggggtttcacgtgtcccgcggtactctggattcagtcgcacggccttctctttcggatacggggctctcaccctctatggcgggccttcccagacccttctcctagataacttccgctaaatgactgtccgcaaccccgaggaataaatccctcggtttggcctcttccgcgttcgctcgccactacttgcggaatctcggttgatgtctcttcctcgccctacttagatgtttcagttcaggcggttcccttcctacgcctattttgttcaacgcaggatgactggatattgtccagccgggttgccccattcggatatccccggatcaatggatatttgctcctccccgaggcttttcgcagcttgtcacgtccttcttcggctcctgatgccaaggcattccccttgcgctctttccagcttgacctatcgccgttctcacagcgacttgtcagagaattcttggttctctttgagaattatgcaggctttacaaagatcgaaattgtatgtcaccctgcatcctttcggatgctgttccacaatcaatttgtttcctctgtgtctccacagagaaacctctctgttgccttacttgcttttgtcacattgttcagttttcaaggtgcagatcgccgtccgcaagctttcgcttgtctccggcacagcttccaaccgcttttgcagtcagatttgaagatccgatctttcgatcaggtcttcaaatccaaaggcaaatcgcctggtgggcccgagtgggctcgaaccaccgaccttacgattatcagtcgtacgctctagccagctgagctacgggccctcgtcttggacgaggtgacgctttattctcttggtggagatagtcgggttcgaaccggcgacctcctgcttgcaaggcaggcgctctcccagctgagctatatccccttctatctcccggcgtacgccctctaaattaaacaacgtaactctttttccgctccagctgaccaggaattccaggcagagcttgctctgcccaggtctccttagaaaggaggtgatccagccgcaccttccgatacggctaccttgttacgacttcaccccaattatcgaacccaccttcggccgcgccctccttgcggttaggctacggacttcgggtgttcccgactctcatggtgtgacgggcggtgtgtacaaggcccgggaacgtattcaccgcggcatgctgatccgcgattactagcgattccgacttcacgcaggcgggttgcagcctgcgatccgaactgggacggcttttgggggtttgctctgcctcgcggctttgcctccctctgttgaccgccattgtattacgtgtgtagcccaggacataaggggcatgatgatttgacgtcgtccccaccttcctccgttttgtcaacggcagtctcgctagagtgctcttgcgtagcaactaacaataggggttgcgctcgttgcgggacttaacccaacatctcacgacacgagctgacgacaaccatgcaccacctgtctctactttccccgaagggcacctaatgtatctctacttcgttagtaggatgtcaagccctggtaaggttcttcgcgttgcttcgaattaaaccacataatccaccgcttgtgcgggcccccgtcaattcctttgagtttcaaccttgcgatcgtactccccaggtgggatacttattgtgttaactgcggcacgcagggggtcagtccccgcacacctagtatccatcgtttacagcgtggactaccagggtatctaatcctgtttgctccccacgctttcgcgcctcaccgtcagttgccgtccagttatccgccttcgccactggtgttcttccttatatctacgcatttcaccgctacacaaggaattccgataacctctccggtactcaagacctacagtttcaaatgcagtttggaggttaagcctccagatttcacatctgacttgccggcccggctgcacgccctttacacccagtaaatccggacaacgcttgccacctacgtattaccgcggctgctggcacgtagttagccgtggcttattcgtcaggtaccgtcttctactcttccctgacaaaagaagtttacaacccgaaagccttcttccttcacgcggcgttgctgggtcagacttgcgtccattgcccaatattccccactgctgcctcccgtaggagtctgggccgtatctcagtcccaatgtggccggtcaacctctcagtccggctactgatcgtcgccatggtgggccgttaccccaccatctagctaatcagacgcgaggccatcttccagcgataaaatctttgacatgcccgggatgccccggtcatgcgtcatgcggtattagcagtcgtttccaactgttgtccccctctggaaggcaggttcctcacgcgttactcaccagtccgccactaagcattcctatcatttggccgaaacctcagtcaagggtgctccgttcgacttgcatgtgttaagcacgccgccagcgttcgtcctgagccaggatcaaactctctataaaatggtatctaaacgaaccgtagtccgttcaaaccttcatagagctatttgtcatagcttcatttctccatctcaccggtaattgactcaacccagtgagatgactttgtcctttggcaaactcacctaaatgagctcgccttctggtgcttccttttcgttacgttgtttaatttacaaggtgcacgccgttcccggcggaacattgctattatactcgatttcatttcgtttgtcaagaacttttttcagaagttttttgacatccgatccatctcgtatcagcagcaacctgtttaggttaccacatctcagccttgctgtcaagaacttttttcatttcttcccggcccggctcatcaccgcgccgacagctttgttagaataccaaatccttccccttttgtcaatacctttttcgaggtttttttatttttctgattgctgtggcgatttctccggctttcgtcccctttccccttgcgcaggttgggaaaataagctgtgcaaacggaggcgacagtggtataatgtccatggaaataaaatgtatacatagtaggagggattgatctgcggattcatcgcatgaccgccaccttcggcaaactccagggccggtctttggagctgggggacggtctgaatatcatcgaagcccccaacgagactggaaagtccacctggtgcgcctttctgctctctattttatatggtgtcaacagccgggagcgggaccgcgctggttttatcgcggataaaaaccgctttgctccctggtcaggcgcggccatgtccggccggatggactgcggcacggaactgggggagttgactctgacccgcgccacccggcggcagaccagccccatgggggaattcagtgccgtatacgccggtaccaacgagcctgtgccgggcctgaccggtgccgcctgcggcgagaccctgctgggcatcagccgggaggtctttgagcgcagcgcctttatccggcagaataacctgcccatcagccaggacgccgagctggaacggcgcatcgcggccttgatctcctccggagaggagggcacctcctatacagaggctgcggatgccctgaaaaagcagctgaatcgtcgccgccataacaggaccgggcagctccccgctctggagacggagctggccgaactggaccgtcagctgtcggagagcaactctctggcccggcagctggtgcaggcccgctccgaggtcgaagctctgtcccgtcgggcggagatcctacaggcggaactgacggactgcaaccgctgggaggccgcccagcgccgccaggccctctccggtgccgcatcggcggcggaacaggcagaggtccgcgccgcgcaggtgcaggagcggcttcagcaggaccaaatcccggagaacgagaccatcgcccggctccgcggcgccatcgtcaatctggagaccacccggagagccgtggacaaggcccggtcggagcgggacgaggccatgaaggcattgctgcgggcggaggccgctgtgaatgagagtccctttgccgggcagagtccggagagcgcccggcgagaggccgcaggaactgagaacgagcctgtcaaatggaatccggtccccggcgtgctgacttttttaattggtgtcccactgtgtttcgtcgtgacctatgcggtactttttctcacaggcagccacagcaagctgcttgcgcttctcaccatgctagccggattctcctgcgtgtgcgccctcgctctctttttgaaaaagcgggcgtttcaggccggctgggcagaactccggttgaagcgcttcggcaccgcggacctggatgccatccgccagctggctgaggattacgccaagctgtgcgaggcccgggacgccgcccaggccagtgtcaacgccaagtccgccgcagcggacaccttatatagtagtctctcctccaacgaacagggcatcctgctggaggtccggcgcttcgctcccgacgccttcgacatccccacggcggaccagctgctccgggcctgtgccgtccggcggaaggagctggcggaggcggagaccgccgcccgggaggcacggatgcgctatgagcttcaggtccagcaggcgcccgctcccggcacgccggaggcggatgtccccgctcccgtccggagccgggaggccatctccacggagctggaccgggtccgcgccgcactggcggaggcccgctcctccgcggaccgtctggacggccagctccacgccgcgggcgatcccgcggtgctgcgggcttctgccgaggacctggctgcccgaaaggagcggctggaaacggagtacagcgctctccggctggctatggaggcactggagggggccaacaccgccctgcagaaccgcttctctcccgctctgggccgccgggcagcggagatcttttcccgactgaccgacaaccactatgccggtgtggtgctggaccggagcttccgcctctcggcagagcctgtgggagacccggtgttccgggatgccgccctgctctccgccggcgcgctggaccagctgtatctggcggtgcgcctggccatctgtgagctggtgctgccgccggagaagcaggtgcccatcgtgctggacgacgccctggccaattttgacgacagccgctgcgctgcggccctgcagtttttgaaagaggccgccgggaaccggcagatcctgctcttcacctgccacagccgggagggggaattttttgccggagacagggaagttttcgtccagcggttgacggatgcggcggtagaggtataagatatggaatactccccgttccccgcagcggcggggccgggagcctgtgtttatcaattacgcgaaagcgaaaaaaggagatatccatactatgagcgaatgcacccacgactgctccacctgcggcgagagctgcagcgagcggcaggaaccccagtccctgctgaaggagcaccatcccgaagcccacatcggtaaggtgttcggcatcgtgtccggcaagggcggcgtcggaaagtccatggtcaccagccagctggcggtcaccatgcgccgccggggccatcaggtcggcattctggatgccgacgtcaccggtccctccatccccaaggccttcggcatccacggccaggccacaggcagcgaggcgggcctgtatcccatggtgtccaaaaccggcattcaggtgatgagcaccaacctgctgctgcccaacgagacggacccggtcatctggcggggcccggtcatctccggcgtggtccagcagttctggaccgacgtgctgtggaactgcgactacctgttcgtggatatgccgccgggaaccggcgatgtgtccctcagtgtgttccagtccattcccctggacggcattgtgatcgtggcctctccccaggagctggtgagcatggtggtggagaaggccgtgaagatggcagagatgatggaggtccccatcgtgggcctggtggagaacatgagctatgtcacctgcccggactgcgggaagcagatccatctcttcggccagggcaaaactgccgaagctgcggagcgccaccatcttcccgtgctggcggagatgcccatcgacccggccctggccgcccttaccgacgccggagacatcgagtccttccagggcagctggctggaggctgccgccgacaagctggaggggaaataatgcccaacgccgcgccgtgtccttccacggcgcggcgtttgccgcgttttgtccgtcctatgcaaatccaccggaggaagcaccttctttttgtgggcaaaaacagttgcaaaatccggcaggattcgagataatagaaaaagatcaaatttggcataaaaccatgcaaaatacagacagatcgagggggaatcacccatgcaggaactgaaagaccgcatcgtgaaagagggcaaggtgctgcccggcaacatcatcaaggtggatggttttctgaaccaccgcatcgacacggagctgatggaccatatcgcagaggagttcggcaaacacttcaatatggacgaggtcaccatgatcctcaccgccgaggccagcggcatcgccctgtccgccatcgtggcccaccacttccacaagcccatgatcttcgccaagaaggccaagagcgacaacatcgagggcggcctgtaccagagcgacatcttctcctacacctataagaaaaaggtgacgctgctggtttccaaggagtggctctccgccgacgacaaggtcctgattatcgacgacttcatggccaacggcgaagccatgcggggcctgtgcgacatcgtcaacgccgccggtgccacgctggtgggcatcggctgcgcggtagaaaagggattccagggcggcggcgaccggctgcgggccgcgggtgtgaacctgaagtccctggccatcatcgagtccgccgagcccggcaacatcgtcttccggggcgaggactgatcctctgcattttccgcggcactctgtaagattcgtctcttttttccgtctgataggatagcggaacgatcgttccctatcttccggcgcatcagaaaaaggaggacttttccatgaaacggcccccactgtttctggtactgctgaccctggccctagcgctgctccccagctgtacgccgccgggaggcggagccgacgcaaagccggtcatctacctctatccggaggcggagaccgatgtcaccgttaccctggactatgacggggaactgacctgtgtttatcccgtcatgaatggaaattcctggatggtcaccgccagccccgacgggacgctgacggacgcggtcggtcagacctacaattacctctactgggagggcgtcagccggacggaatatgacttctcccagggcttctgcgtaccaggcagggacaccgccgcctttttggaggacaccctggccactctgggtctgaaccgccgggaggccaacgagtttattgtctactggctgccccacatggaggggaacgcctataatctgatcgccttccagacaagttcctacacggaccatgcccggctcacggcagacccggcgccggacacggtgctgcgggtcttcatggcctggaagccgctggaccgctccgtggagcttccgccccagacactggccgccccggtgcgtaccggcttcaccctggtggagtggggcggcgcagagatctcataaaccgaatttacacaaaggaggaattcccttgtctcaccagactgtcatcgtgctggacttcggcggacagtacaatcagctcattgcccgccgggtccgggagtgcggcgtctactgcgaggtaaagccctacaccaccccgctggcggacatccgcgccatgaatcccatcggcatcatctttaccggtggccccaacagcgtgtatgatcccaaatccccccaggtggacccggccattttcacctggggcgtgcccatcctgggcatctgctacggctgtcagctgatggcccataacctgggcggccgggttaccgaggcccaggacgactccgcccgggagtacggcaagaccgagacgtatttcgattcggcctgcaagctcttcaagggccttcccgcccagggcatcacctggatgagtcacggggactacatggagaaggtgccggagggcttcgctctggtggcccactccgacgcctgccccaatgtggccatctgcgatgagagccgcggcttctacggcgtccagtaccacccggaggtcaatcatacggagcatggcaccgacatgatccgcaacttcctgtatgaggtctgcggcgcagcgggcgactggaccatgggcgactacaaggagactgccatccgccagatccgggagaaggtgggggacggcaaggtgctgctggccctgtccggcggcgtggactcctccgtggcggcagccctggtagccgaggccgtaggcagccagctgacctgcgtgtttgtggaccacggcctcatgcgcctgaacgagggcgacgaggtggaggaggccttcaaaaagtgggatatcaacttcgtccgggccaacgcggaggagctgttcctctccaaactctccggcgtcagcgagccggagcgcaagcggaagatcatcggggaggaattcatccgtgtctttgaggcggaggccaaaaagatcggccaggtggattacctggtccagggcaccatctatcccgatgtgatcgagtccggcaccggcgacgccgccgtcatcaagagccaccacaacgtgggcggcctgccggactatgtggacttcaaggagatcatcgaacccctgcggatgctcttcaaggacgaggtccgtcagcttggtcgggagctgggcctgccggagtatctggtcatgcgccagcctttcccgggcccgggccttgccatccgggtcatcggcgaggtgacgaaggacaaactggacactctgcgcctggcagacttcattttccgggacgagatcgctaaggcccatctggagggcaccatgaaccagtatttcgcggtgctcaccaacatgcgttccgtgggcgttatgggtgacggccggacctatgactacactctggctctccgctctgtcaccaccacagacttcatgaccgccgactggacccgtattccctacgaggtgctggaccggatcagcgtgcggattgtcaacgaagtgccccatatcaaccggattgtgtacgatatcacgtccaagccgcccgctacgatcgagtgggaatgagaaaaaagtgaatatgatgggctgaaaagccttgaaaacactcactttttgaaaatctcatttcctgtttgatagcaaaatgatagcagataccaaagccattttgtttgttcttattgtggcgagcgaatggtttgcaggtttgctgtcgcatccaatcctatattgagagcgaaaaaggctctgctgactttctgtaaaagaaggtcggcagagccttttgttattcttcgttatgttccttgagatcagcaaggagcagatcactcagctcctgcgacggcataatcttgtgccactgaccggaggtgtcaagctcagggtagcggtagcgccagcggtcgtattcttctttggtaatctcccccgctttcagcttggcagcaagcgcgccccatgcggaaagcatcctgtgaagctccgctgcgtcgcgtcctttgtggatatgaacgcgcagatgcacctcatcctcacactcgcagacctcaagcccgtaacggtcttccagcgtgaacagcgtgtgcatcagtcctgtataggagtcaatgtccggtacgtccagtgccttgggcgaaacgtcaagcacctgtgccagcgcagcggtcacgtccgctttaggcgttctggaaccattctcgtactgcgcaaggcggacatctgcggatttctccgggaaacccagcgccatgccaaggtatttctgcgtcatgccccgcatcgtgcggaaaaagtggatgcgttcaccaatcgccataatagccatctcctgtgtcggttatctttgataaagagtatagcagatatgtttaatttcgtcaagaaaaatctaagcaaatttatttaatattttcctgcaaaccggcttgacttaaaccaatatgtatagtacaatggctgtaagctaagcatattagcttaattcatagaaattttacaattaggatagtcaacaaatgcagaaaaaatgtccgttgtaaggtgagaggggggtgaaatccaaaagagccaaactgaatgaccgtccaagggatactttctccggggaagcacgcgatgagacgagcgtgccaaggagaaaagaaaacggcacagcgccgaaaagggttgcctgtcagagtcctgcggatagaacggcagaagaaatcaaccacaaatcaggaaaggaaggtattttgcctatggcaggagaaatttttatgagagtaaatgaagttgcggaagagcttggcgtatcggttccgtatgcgtataagctcattcgtgagttgaacaaagagctgcgaaagaccggctgcatcaccattgcaggcaggattgaccgcaagttcttccatgagaagttctacggaacgagagaaccgaaggaaagaagggaatcgaatggcagcgtttaaggacaagaagaacggctcatggtatgtgcagtttcgctataccgactggcgcggtgagcgccagcagaaattgaagcgcggctttgccacgaaaaaagaggcgcaggcatgggaacgcgagtttctgatgcagaagcaggctgacatcaatatgagcttcgaaagctttgtggcgctctatgaaaaggacgtcaagcccaagctgaagctcaacacatggctcagcaaggagcatatcatccgcacaaagattctgccgtattttaaaaagcgcaagctctcggaaatcaccgcccgtgatgtgatcgactggcagaacgagatacggcagcacaccaagtcaagcggcgaaagctattccccggactatctcaagaacgtccatacccaactgagctgtattttcaaccacgccatcaagtattacggcttacagatcaatcccgctgcaaaggccggaaatatgggcagcgagcagccgaaggaaatgctgttctggacgaaagaagaatacctaaaattcatcgacgccatgatggacaagcctatgctgtactacgcttttgaaatcctgtactggtgtggcatccgcgagggcgagctgctggcactgacgcctgcggactttgatttcgagaagaaaacgctccgcatcaataaatcctatcagcgcttacagggcaaggacgttatcaccacgccgaaaacgaagaaaagcaaccgcgtgatccagatgcctgactttctctgtgatgagatacaggactacttcaaggaactttatggactggaaccggacagccgtatttttccgctgtccaaatatgccttgaagcgcggcatggagttcgggtgcaaggcgtctggtgtcaagatcatcagaatccacgatttgagacacagccatgtttctttacttatcaacatgggctattctgccgttgccatcggcaatcgcgtggggcacgaaagcgtggagatcacctatcggtacgcgcaccttttcccaaccgtacagaaggaaatggcagataaattgaacgtcgaaaggagtaattaaaaatgtcactgaaaaaccgggataaccacaaccgctggcgcaacaagactgttgccttccgggtatcaccggaggaagaccaacaaatcgaaaccttcgtcaagctctccgggctgaccaagcaggactacatcacacgccgtttgacctgcaaggatgtagtggtgcagggcaatccgagggtttacaaagcactgcgcgaccagcttgccgccgtgctggatgagctgcggcgtattaagacgggcggcagcgtaaatgacgagctgctggatgtgatcgaaatgatcgccgccatcatggacggcatgaaagaggaaaatgcctatggaaaatgaaatctgcaaaaagaaaacgaccgccccggacacatctgttggcgcagatgatgggcagccgcttcacaattcaactgagaacagtatatccgcttttgaagaagaaatcaacggtgattttcaaagcagtgcggaaagtcttgacgaaatctatcgcaggattcagcggttaaccgacccgcattacctgcacacaatctccatgaccgaactgtaccagaccgcatatcagagcagaccgccgatcatcgacggcttgctctatgcgggtgcgtacatcctcgcaggtgcgccaaagatcggcaaatcatttctggtggcgcagatcgcctatcatgtcagcacgggcgaagctctatggggctgcgaagtccatcccggcacggtgctgtacctcgcattagaagatgactttcagcgcattcagagtcgaatgtttatgatgtacggcgtcaacgacaccgaccggctgcactttgcaactgcggcgggcaagatcggaaacggactggacgaacagcttgagaattttgtgcgcgagcatcacgataccaaactcattatcattgacaccatgcagaaaatccgggaagtcggcggcgaggcgtacagctacgccagcgattatgagatcatcggtcggctcaagcagtttgccgacaagcactgcatctgcgttttgaccgtccaccacactcgcaagcagcctgccggtgacagcttcgaaatgatctccggtacgacagggttgctcggctgcgcggacgggtcgcttctcatgcagaagaaaaagcgcacggcattggaggcaaccatcgacgtcgtggggcgcgaccagcaggatcagattctctatctgaaaaaggatgccgacacgcagatctggaatcttgaaaaggtagaaaacgagctgcacaaagagccgcccgatcatgttctggatgctgtcgctggactactatccgcagaacatccaatctggacaggatcgccctctgcgcttgccgatgccgtccatgtcggcatggcggcaaatgcgctgagcaagtatctgaatgtgaagtctggcagactgttggatgaataccacgtccgctatgagaacaaggttcggcacgaagggcgacgtatcacgctgacctatgatgctgaaagcaaataagccgcgcgacggctgcgacggttgcgacggtgaaaatgataccgtaaaacaaccgtcgcaatcgttgcgaccgtcgcggagggaagccggcagcacgaccttccgcgcccccgtccccatcgaaaaatccgcagagtttgagatggatgtgggcaggagattatgagcagaggttgtctgcaaataagctgctgaccacgccggtttttgcggtttgtatccacactgcaaaccgcaaaaccggcagagacttccgcagaagccgcataccccctcggagagcccacgatactttgcagccgcaggatgaaagtatcatagtgggttattacacttccgcagaagtgcctccccgaaagctacccgtcctgcacaatctgaaatcaggaggtaaactgcctatggcaagaggcgacggtatccaccgtaccagcgcaagaaacgcaagaatgaaagatacagacatcgacaacgcacaggcgcataatgagcgcgaaaaatcgtcgtatgtcaatcaggacatcgttcctgaacggacgccatacaacgtccatttcaaaacgccaaccgccgggtataaggagatgttcgagcagatgcgctctgacggcgtgatctcaacacgcggtctgaaagcggatgctgagaaattcggagagctgatcttcgacgtcaactccgcctactttttcaaccacggcggctatgactttgcaaaacaattttacgccgatgcctacaaagctgcaatcagaattgtgggcggcgagcaatacatcctatcggcggtcatgcacgctgacgagcgcaaccgcgccatgtccgacgcgctgggacaagacgtgtatcactaccaccttcatgtggtctatcttcccgtcgtagaaaagcaaatcctgtggtcgaagcgctgcaaggatgagtcgcttcgcggcacggtcaaggagataatccagcaggtcagcatgagtaagaagtgggcttccaagcccgcgctggacgagaacggcacgccgattctgagcgccaagggcaagcctgttctcaaaaatcctacagcgttttgcaggacgatttcttccggtatatgcgcgacgccgggtacgacgatgtggagcgcggcgaacgcggcagctccgaggaacacctgacggtgacgcagttcaaggtgcagcaggagcaggcgcggctggcagaactcacagagcagaaccgccagcaggaacagcaggcggcgacgctcggcagacagattgagaaaattcagaatcagcaggtcaatgtggcagctatcgaaaagattgaggcgaagtccgtcccgctgtcctctaaggtaatattggagcgttctgactacgaatcgctggcaaaggcagcaaagaaatacgctgcgtcagagaaaaaggaatccaagttgcaaaaggctttggatgcggcaaacaggctgattgcaaaactcaaggcagagatcgccggtttgaaacaggagctttccgagtacaaatctgttcgcagcaagctccgcacatcggatctggaacgcgaaaacgcagaacttcgcggaaaagtgcaacgctatgagaacgtgatccagcgcaataacctctggcatttcttccgtccacgcagagaaaaaacggcaatgcgggacgatgcccgctgatgccgtgttgagcggagaaaaaccgattttatcaaatgggagcgtccgaatcgagcagcgtatcatttgggcgctccctattcaaaaatcaaccgctttttgcaggtgtagagctgacaaaaaatcttgaaaatgcacctgttttcgcggggcaggcagaaatggaggcaatatgaaaaccggactgaccaaacggcagaaaacgacctgcatctattttgacgaagccagcaaaaccgttgaaatccagacgcacaataccgcgctcaaaaagcggctgacacaatatgcggcggcatatcccaatctgtgcaggcagaccgacgatgacgaacagggcggtctgacctttgagattgaccgcaggcgcttcgctgtccgattgaccgctccgtattcagatgagcgccgtcacgcagcaagcgagcttgccaagaagaatggactgaaaggaagaccacaattatgaattgtagactccagacgcatttaatatttgtactcctatgaaatcatcattaatattgacactattcgtttttgtgagtataatatgatcattaaattacgaaataactggaggaatctatgtatatttcagttaatgatgcggcttcaaaattcaacatatcaaagagacgagttcaagttttgtgtgaacaaggacgtattgacggtgcaaatatggttagcggagtatggctaatacctgatactgcttccaagcctatcgacggtcgaagaaaacatataagttgtaacaaagctgaccagattggtgtcgttcacgacatttttactgttgatgatgtatgtaaggaattgtctatatcaaaagcaactgcaaaaaactggattcgcttgggtaagattgtccctgacattgataaccagtttttcagccgaggatatattgaaagattttcggcagaacttaaaaatcccaaaaataagaagcttaagagccgcagaaacaaaaagtcctccacaggaaaaatcctctacaaagactatattcatactgaaaataataagaggttagtttctgaactattggaactaaatatcattgaagatgaaagggatatggttgcagtacttgcaaattttgccgttcagctttattatcaaagccgaaataagcagtattcagataacaaccttctaatgcgttttttgacgcaaaaacactttgacgatttccatattctaattgaagatttgctaggatcctacaacatagattctgcattatttgaaagattacagcccgcattgacaaaagaaattctttttgtgagcggggaagactcgttaggctttgtatatatttccttacaggatattgcccggcgaaaaagcaggggtgcctattatactcccgaaaaggttgtaaatgagttgattgaaagactatacaaaaatgatgttaatttgaacgcgcgaacgatctgtgatccttgttgtggtaccggtaattttttgctgagacttggtatgatgggaatggactactcaaatctttatggtcaagatatcgaccccataagcatttatatcaccagaatcaatgttgcacttatgacgccccaaatgaccgttaccgatctttattccagattcattatcggtaacacatatttgatgacctttacgcagaaatttgatgttgtgctcggaaatccgccgtgggggagtgaattttctgaagctgatgtaatcacatatcgcaagctttttcaaactgcaaccggtaaaagtctagagtcgtatgacttgtttgtagaaaaagcgctaactatgctcacttacaatggtgtgatggcgtttgttttgcctgaggctattctaagcgtaactgcacatgaagcggtacgaagactaattctcgacacctgttcattcaaatttgttgcctatttaggaaatgtgttttccggcgtacaatgtccctctataattctcggaattatgcccgacgcagctaagacagtccttggctgtgaagtttcaaccggcaatactacttttgtcatttcaaagcatcgcactttctctgacggaaccctctcattcaatgtttctgatgaagaaaatcgttgcttaagtacgattagtgggattgaaaatgcggcttttttgaaagaaaatgcgaaatttgcgcttgggattgtcacgggtaataataaggaatatatatctacagaaaaacaaagtgataatgagttggttctgaaggggagcgatattcaaagatataaagtgtgtccgtctggaaattacatccggtttgagccagaatcttttcagcaagtagctcctatagaaatctaccgtgcaaaagaaaagctactttatcgctttatcagtgaagtacctgtattcacttatgacaataagcaaacactttctttgaacagttgtaatattgttatccccgaaattgatggacttgcaataaagtatgttcttgcaatacttaattcaagcgttgtagccttttttatttcaaagaaattcaactctgtcaaattactccgttcacacatagaacaggtaccaatacccattgtttcagcagaagaacaggacagtattataaaaaaagtagaccgcataatgaactctttcgaaaacattagcggtctatatagcgagttagatgacatgatcatgggtctgtaccatttaacagtacaagacagaaaaatcataacagcggctttggctggtaaaaatctatttatcgatttttgacttgcccttagcataaaccgcatcaagtatgttttcttcttttacaaagaacgggagcaactcatcttctgtcatgaacacttgcccttcaaacactggattatctgccgttcctgtatgttcatttctatgttgcgagcctagtttccctgttttgagaagttcgtcactactcaaaacccaataaagcaacgtatcccgacaagtaccaatccaaatgaatacatcgcaacaagacggttttaactgctgatagtgatatttgaaccccgtatcatgcgcctcggtgtgtaaataggctcggctggctaaacttccactactttttgtactatttgctcgacacgctttaacctcaatcctaataccatccagccaaagatcaaattcgccgtcaaaatcagggtatacgtcggcaaggttttctttcgtagctttgatgaactgcgggaacaattttctaatgtattcttctccccatgtttgaccatatgtgcggggagccatatcaaacagttcgaggaactgattcctattgcagtagtcttcgtcgagcttagcatattcgtcatatgtaatttcaccaagagacatcagatatgctagaattcggctctctctactgaatggatataatgctttttcacgcattatagaagaaatttcctctttcgtacattttgaattgcatagcaattcttcaattttctctcttaactgcttcatgcgtcctcctccgatataagaaatagtttatatggttctacgccaagtgcatctgcaattctctgaatattttctaacgaaatgctcctgcgaaagcattcaatagcactaatgtatgttctgtgcataccgcacttttctgcaaatgcctcctgagataacccggtctgctggcgataccgcttaacatttgatccaaaaaccttgactatatccatacttgtaaacctccatgatatatgctacaatatcgaatacaataagtctacatacaatgagtcgcgagacacaccacatctggaaggacatttatcacgcatcgttgttgtgacagcataaaccatgtcgtatcgtttggcttctcttcgtatattaccgacgatattagcaacatatatctgcaccttatgagttggtttgcgtggccaaaggagttagttttgaaactgctcatgtatgacatgtacacctgattaaaggagaaaaagtacaaatttcaaataatctatggagggattactatggcgttaccgacaagttatatgacagggagtttcacaaaaattcctcagtattttgatacaatgctgacagcaaaagccccagacaaatttacaacaaagttcatggctgatttaggctttaccagttcaaatgacagacaatttgtaaacgtattaaaggcaattggctttttggatgatagtggaaccccaacagaaagatacttcaaatttttggatcaaagcttttcaaaacaaatggttgctgagggaataaaagaagcatacgccgatttgtttgcccttaacacgtctgctaacaaaatgacgaaagcagaggtcgaaggaaaattcaagaccttgactaatggttctaaagaaaatgcaactatcggacatatggcaagcacatttataaatttatgcggatatgcagattgggctgaaacgcaaagctcacctacaccgactcaatctcaaaatgctgatcctgtgcaaagctctgataacggattaacttcaaaggttgcccatcctcacgaaggacacagaattgatttgaattacgatatccacattcatttgcctgcaacacgcgatcaggcagtttatgatgctctatttgcaagtttaaccaaacacttaccgttaaagtaggagatatcggcacatggagacggatttatattcatttgcttttcgaggaatactggcagaagaagcccttgacaaagccggtcacaaaaagtataccgcagaagaagctttcttttctgagtcattggcaaaagaacttcatttcgatgaaatcgacagcaaatatgtcgagcaatcaaaaacaatgataaccgtttttgcgaccataacagcatttgaaaacgcaacacgagaatttgttttctcaacacttgctggggcatatggcgacgattggtgggcaaaaggtgtacaaaacggtattagagagaaagcgcaaagtagaaaagattctgaaaccaaagtcaaatggcatataaatcgtggtgatatgatgatgtcatatttggaatttggtgatttacctaagataatgtgttcgcaggggaattggccttattttgaaccatactttggtttttctaatgctcaagagtggatacgtactacatttgagacaatcgaaaaatcacgaaacgtgataatgcatagcggagtattggacgaattagatgttgctagagtagggatgaatataatagattggttgcatcaaatcaatgcctaactactgtgcagcgtgtaattattgcatatattatgatctggcagaatattctttagataattcttgattgctgatttcttctattgatagcatcccctgatagctttttgatagcagaaagtcggataccccataggattgggataattggtatcaaataaagccaaatggaagcaaacggtctatacaaaaaagtttagagcgcgtttccgcttggcgagtgggaatgacggtcacaagctccagggcctgcgcttgggccctggagcttgtgattcttaaaatcggaacaggagggatcacatggatcaggcaggcgtcgcgctataccaccgtgttatgcggtgggaaaattttgagaaggcggcaaaggatcttgtgtccttggtatacgccgcggaaaagaaggagccgggaaagccgagaaccctgtaccttgacattgacggacaccgcaatgcgcagggcaggtttgacgcggatatgcggagctccaaaagggattcggattgagatttctgcttccgtttcttacggaagttcatttcccactgatttctgacaggaacaagaacccacagcggaatgatgtgcccgaacggctggaaatttcccacgccagaaatgagaaggaccacagcctagacgccccgtatgtggagaatttcagccacaccgaatatcagtccgaggcgactgtatacgcctatctcaaacaggtctcggattttttgaagcgctaccaagagctggacgcagagtatgcgctgctgcccccagagccctatgacccgcaaaactatctgctccagtggcgtcttcacatgcgcgagctgatcaacgagctcttcaacatgtttgtgggcgggaatctgttttccacagcggcgatgacgcggactctgatggagtgctgtgtctacgggaaagtgctgaagcaggaaaagagcgcccgccttttggaagactggtttctctgcgggatgatccgcagcctccccggccaggatggggcgctgcggcaggcaaaactcaaaactgtgtatgcactttgcagcgcatggaaccgagagccggaggaaacaatccggcggttcaaaaagggcaacgaaaacgagtggctggtttccgtgatcccgggcaaaggccggatctacttctcccatgtttgtgaatacctgcaggaaacggagctctatcagacgtatcaatgggcctgcgcgtttgtccacgggcaggatatccgctccaaaatgcatcccttcacattttacgactccacctatcatctgctcactgtgatgatgtcttatatcttcagggcgatccgcctgtaccctgtctctgaggagctggaggcggagatgcagaagctcgaacgggacctggctgctctttggggaaccaccagctgggacaaaaacgcatgacgggcttacgaggcggctgtacaggttgccgcggcgctgatggtgccctgccaaaagcatccaaaattcaaaaagagagacatctactttccgcagatgtctctctttcgagaagggacggtcaaaatcgatattttaaaatctcgaaaaggtataggagacccaccccaccggccttctggccggcggcgcatttgcgccgcacgggcgctttgccgtagataaaacctcggcgcaggcggaattcacttccgccgagcatttgaatcaccgaagggcgggggccgccttcggctgccggagcccaaagagaaaggacttccggataggaagccctttctctttggtgcgcgaggcgggacttgaacccgcacgtccgtaatggacactagaacctgaatctagcgagtctgccaattccaccactcgcgcgtcgatatgaactttgctccctgtatctccccgttggggtgttccaccggaagggagccctccggtggaacgtggtgcgcgaggcgggacttgaacccgcacgtccgtaatggacactagaacctgaatctagcgagtctgccaattccaccactcgcgcatagagcggttatcttttcagagacaccgtatggtgcggctgacgggatttgaacccacacgtcgattcggacaccagcacctcaagctggcctgtctaccagttccagcacagccgcaaatgttcgtcccctaaaaaagactgcttgattattatagccagtcgagatccaaatgtcaactgtttttccccgatcagtcgaaaaaatttccatggaccaggaattcggccgggaccgccgaagacggtcccggccgcctgacctgttcagcgccggtccatggacgtatagggacggtgctcctccacacactcataccgggggcggatcagcttgcctcccacggagagctcctccatccggtgggcactccagccggcgatacgggccacggcgaacaggggcgtatacagctccttgggcaggcccagcatctcatagacaaatccgctgtaaaagtcgatgttggtggagagcacagacttgtgctgccgctccatcagcagctgcttgccgatcttctccacattggcgtacagggccagctcgtcctcccggcccttttccgccgccaggtgattcacgtaggcccggaacacctcgcaccgggggtcggtcttggtatagaccgcgtggcccaggccgtagatcaggccgctgcggtcgaaggcatccttgttcaggatcctggtgagatagtccgccacgcagccctcgtcattccagtcccgcacgtgctccttcacgtcgtccatcatggccatcaccttgctgttggcgccgccgtggcggggacccttcaacgaggccatggacgcggcgatggcagaataggtatctgttccggaggaggtgaccacatggttggtgaaggtggagttgttgccgccgccgttgtccgcgtggaggatcagggccacgtccagggtccgggcctccagatcggtgtagctgcagtcctcccgcagcatccgcaggaagttctccgcggtggacagctccggcttgggcacgtggataaacaggctctccccctgactgaaccgccaggcctgataggcgtagatggccagcacgggcatattgctcatcagctgcaggcactggcgcagcacattctccagcccgatgtcgttgggcttgtcatcatagcagaacagcgtcaggatgccccgctgcatggtgttcatcagatcccggggcggcgccttcataatcacgtcccggaagaaattggtgggcagcgtccggtaggaggccagctgctggcagaatgcctccagttgggcggcggtgggcagttcgccgaagagcagcagataggccgtctcttcaaaggcgaagcggcgcccctcggagcccttcaccagctcccggcaatcgatgccccggtagtaaagcataccgtcctgggggatgatgtgctccccctccgtgacgctgtaagactggatctcgcccacccgggtcaggccggtgagcacgccgcggccgtcctcgtcccgcaggccgcgcttgacgttatactccttatagagcttggggtcgatgtagtttttcttctcccactgttccttcagcgcgagaatggcgggggtgatctcacaataggcgttctcacggttctctttccagaccataggggtgcgcgctcctttcggcggcatgcagccgttgtactatttgcaatagtatcattaaaaaattgcattttcaaccgttttaaaaaatatttttgaaaaaataagaaaacttttgaatttttcttttttcgaacttgcaaattcaaaaagcaacaggcagccctcggagggctgcctgaagaactccggcgccgaagcgcctcacagctgggccagggtctcgccgatggggtcagtaatcaccagatccgcggccagatcccgggccaccggcgacttgttgaggagcaccagcctgtgcccctgatagtatcgaatcagccccgcggcgggatagacgttcagggaggtgccgccgatcatcagcatatccgcctccgccagggcgcggacggctgcctccagcgtcccctgatccagcccctcctcatagagcaccacatccggcttgatgatgccgccgcagctgcaccggggcacgccctccgtgcggaggatatgctccagaccgtaaaatttcccgcaccgctggcagtggttccggtggacgctgccgtggagctccagcacgttccggctgccggcggcctggtggagcccgtcgatgttctgggtgatgacggctttcaaccggccctccgcctcccactccgccagctttttatgggcggcgttgggcttggcgtccggggccagcagcttggcccggtagaagcggaaaaattcttcggggttgctttcgtaaaatgtatggcttaaaatcacttcaggcggatatttccattcttggtgatataggccgccagtgctgcggaagtccgggatgccggactctgtggaaacgccggccccccgaaaaacacgatgttgtcggagctgcccaccagttccttcagccgtttaatactgtccgtcataccggaccctccattccaatttccaattttattgagacaggagcacaggcatgaacattcagatcttcggttcctctaagtccttcgactccaagaaggcggagcgctggttcaaggagcgccgcattaagtaccagtatatcgacctgccctcaaagggattatcccccgggagtaccagtccgtcaagcagaaagtgggctttgacgccctggtgaacacgaaatgccgggcctatgaggacctgtacatggcctatatcaccccggacgcccgggaggagaagctgctggaacacccggagctgttcgtgacccccatcgtccgcaatggaagggaggccacggtgggctaccatccggaaatctggcagacttgggagtgagtctctgccgcccgacagaattctgcaccgctgcggaacagatcggtggtattctgtgcatactatggatgcacacggagaggaggtggcctgcgtgcaaaggcgagcctggatggagctgccccaaaaccgctttctgcggggcatctatctgctggtgcagcggtatctgcgccacaatgtggggatgcagggagcggctctggcgttttacctgctgttcatgatctttcccctgctgatctttgtcagctccctgctgggcctgctgcagctggacgtggatgccattctggccgcggtgcaggagttcctgccccgggagatcgtgtccttcatcggggtgtacctcacctatgtgggccggaaccccagtgtgaagctgctgctgttcggcctgttcttctccctgtacttccccatgcgggccaccaacacgctgatgcgctccgtgcggatcgcctatcacctgggcccgccccggggcgcgctgccccagctggtgaaaacgctgctgtacacggcggtgctgatcgccaccatcgccctgaccctgacgctgatgtccgtgggagaccggctgctgctctacgccgtggacagcttcggcctgccccggttctgggcggtgctgtgggcgaagctgcggttcccggtggcggcggtggcagggtatttcgccctgttcttcctgtacgcactgtctcaggacggccgccagccctggcggaacatctggcccggcactatggcggccctgggggcctggctggcgctgaactggctgtactccacatacgtggagaactttgccgactactccctgctgtacggctccatcggcacggccatcgcccttttgatctggctgtatatgaccgccgtgaccctcatcatgggggcggagctgaacgccacgctgatctccctgcgaaaggaccgggcgggggaatcgtaaacgatttttgaatcccggcggcccccgctttactttacgggagagatgctctacaatattctctgggtgaggaaacccttggaaaggatggaatcaaatggaatccatgaaagaaaaactgacggaatacgcccagctgctggtgcgggtgggcctgaatatccagagggggcagccgctggtgatctcctcgcctgtggagtgcgcctttttcgcccgtctctgtgcggcggaggcctatcaggccggttgccgggaggtggtgatgaactggggcgacgatgaactgggccggatgaagtacctccatgcggctgacgaggtgttcgacaccgtgcccctgtggcggcggcacttctacaacgactacgccctggagggggcggcgtacctggccatctccgccagcgatccggagaacctcaagggcgtggaccacagccggatcgtccgggcccagcaggccagcgggagggccttgaaggacttcgaccgtctccagatgtgcggcggcttcccctggtgcatcgcctccatccccatccccagctgggcgaagaaggtgttcccggatcttgcggagagcgaggcaatggacaaactgtgggaggccatcttccaggcagtgcgcattaccggcgacggcaggtgcgtagacaagtggcaccggcatatcgagaccctggcccatcgggtggagaagctgaaccagctgaacttcaagtccctccactacaccaactccctgggcacggacctgactgtggaactgccggaggaccacatctgggaggcgggtaacgacgtgactctgtctggccgcacctatatcgccaatatccccacggaggaggtcttcacctctcccctgaagaccggcgtcaacggcgtggtctactccgccctgcccctgtcccacaacggcaccatcattgacaagttccactttgtggtgaaggacgggaagatcgtggaggttcacgcggaacagggggaggaggccctcaaggccgccgtcactgtggatgaaggggccagctacttcggcgaggtggccctggtgccctatgacagccctatctccaaccagaagatcctgttctacaacaccctgttcgacgagaatgcggcctgccacatcgccttcggcgaggcctatccctgcctcaaggacggccaggccatgagcaaggacgagctgaaggcccggggcctcaacgactccatcacccacgtggacttcatggtgggcacgccggacctgaacatcctgggtattacccacgacggaaaggaaatcccagtgttcgtggacggcaacttcgccccggagatctgaaatcagagagaaagaggagagaccatgacatacgagctgagaaagactgacgagaacgtgctgattgcggagggcgcctccgtcaccggagacgtgcggctggcaaagggcgtcagcatctggtacggtgcggtcctgcgggggacatgggccccatcaccgtgggaacggacaccaatattcaggacgaggccatcctccacgaggagacggtggtgggcaggggctgcaccatcggccacggggccatcgtccacggctgcacagtgggggacaacaccctgatcggcatgggggccattgtcctcaacggcgcgaagatcggcagcgactgtatcgtgggtgccggggccctggtcaccggaaaaatggacgccccggacgggtccatgatcctgggcagccccgccaaggtggtgcggcccctgaagccggaggagatcgaaggcaaccgggcggccatggaggagtatctggaagctgccgcccagtatcggaaggagcaggaagcccgttgagacaggccctccgggccggaaagagagtttaccgttcatggaatggaacaaacagaagatcaaaggacttctgctggtggtctgcggcggtgtggcgttttactgcgcactgcagcgcctggatgcagtcctggcggcgctgggctggctgcttgggattttggcgccgtttctgctgggcggcgccctggcctttatcctgaatgtgcccatgcgggccatcgagcggcacctgttccccagaaaccggaagggcgcaaagctccgccgccccctggccctggtgctgaccctggtcgcggtgatcggtgtgctggccctggctggcctggtgatcggcccgggcatcgcagatgcagtcatgtccatcattcgggagattcctgccgccttccagcgactggagcaccagctcaccgccctggcggagaacctgcaggacctgtggcctctactggaggagcagctgatgaagctgcaggaggagatccaatggcaggagctttctgccaaggctctggagatcgccaaggcaattggggccgggattgtctcctccggtgggttcatcggcggtgtggtcagcggtgtcagcacctttgtcatcagcctgatcttctccttctatgtcctgctgcagaaggagaagctgggccgccagggccgccaggtgatttacggcctgctgcccctgcggcaggccgaccggacgctggacgtcctgcggctgtccgggcggaccttctccagcttcctctccggccagtgcctggaggcctgcattctgggcacgctgttcgtcgcggccatgaccatcttccggatgccctacgccctgctggtgggcgtcctgatcgccctgaccgccctgatccccattgtgggggcttttatcggctgcgctgtgggcgcactgctcatcgccatcgacgatccctggaaggcgctgtggttcatcgtgctgttcctggtgctccagcagatcgagggaaacctgatctacccccatgtggtgggttcctccgtggggctgccctccatctgggtgctggccgccgtcactctgggcggcaagctcatggggatcacagggatgctgttcttcatcccgctgtgctccgtgatctacgccctgttccgcagctatgtgaaaaaccggctggtgagcaaggcagtcccaccggagaaatggcgggacccgcctcccccaccctcccggcagtgagcgttctttccgccgccctacatctgttcaaaaaccggccgtccaaattgggcggccggtttttgtgcgcagattcaatttttattgacaagaatccttgtcagtgctatgctatatttgacaagaataattgtcattttgacttggatcattgtcgggaaaggggatgagcggatgccgctgtacaaccggctgaaggagcaccgggcccggctgggggtcaaccagcaggagatgggcgccctggcgggtgtttcccgccagaccatcagccagatcgaacgggggactactccccctcggtgacgctggcgctgaagcttgccaggatctgcggtgtaaccgtggaggacatttttacctatcaggaggatgaatgccatgagcgataacgtgaggcgggacaaccgcagggcgctgcccaaatacctgctgacaattctgctgttcgggctgctgggcggcgtgctgggctttttcaccggtgtggctggggccgctggcgtggcggagacggtgcggcaggccctggaccgggtgctggcggtgtgtgcgccctggggcatcgtcggcagcgccgtggtgctgctgggggcgggctggtacctctatgccgccgccaaacggcgctttgccgcctgggatggggaggacgaggacgccatggacgcggcggagcagcagctgagctgggctctgctgctgacggggctggtgataatcctggactttttcttcttcgccgcctccatcatctacgaccgctttctgccggacctgatcctctttctggcatctgtggcggtgctggtggtgctccagcagaagatcgtggacctggagcgccggatcaatccggagaaacggggcagcgtttacgacatgaaattccagaagacctggatggacagctgcgacgaggcggagcgggcccagatcggccaggcctgctaccgggcctatatggtggggaccaaggtctgcatcttcctgtgggtggccctgctgatcctgaactttgtgtttgacttcggcctgctgcccatcgcggcggtgctggcggtgtggggcgcgatgcaaacagtctatgcccttgagtgcatccgactcagcaagagaacgggggacgcgtaatggacatcgcgctgctgggcgccgttttggcagcctgcgtgctctgcctgttggagaaaaagaaggcgcaaatctgatgccgccgggcatttcacaaagccggcccgcttgtcagcgggccggctttgtggtattctttattttgtttgaaggaatctgcggtccatcccggggcggtccgctccccgatgcccggatttggcggaggtgtttatggtcgaattgctgctgattttagcggcagccgctgctgcggcagctgccctggccgggcttggatacctgctggtctggttcctgctccacggccggcgggatggtcctggctgggaaaagctggagggctttcggtacgcccaccggggcctccacggccccggcgtgccggagaactccctggcggccttccgccgggcggcggaggccggatacggcgccgaactggatgtccatctgacccgggatggacgcctggtggtgatccacgacggggatttggagcggatgtgcggcgttcccggccgggtggcggaaaaaaccgcggaggagcttgccgctctccggctggcaggctcagaggaacacatccctcttctggaggaggtgctccccctgtttgccggacgggcgccgctggtggtggagctgaagaccgaccggcacggcgccgcggcgctggcccgggatacggtggattgcctggaccgcttctccatagactactgtgtggagagctttgacccccggccgctgcggtggctgcgccgccaccggccgtcggtgctgcggggccagctgtcccagaatttccaccgccatccatccggccagggtccctggaaccgcttggcgctgacgaatctcttctacaatgcattcacccggccggattttgtggcctaccggttcggagaccgggaaaagccggcagtgcggctgtgccgcaaatttgggatgcggatggcctactggaccctccgctcccgggccgatgtggcccttgccgagcaagagggcgccctgccgatttttgaagaaccggaccgaccgaaggaggtaacccattgaagtcgacaaagaaagaaaagaagcagtataaaaaggcatttcaggaggccatggcgcgggagctgcgggaacacaaaagctccttcatcgtcttttccatcctgcggattctggtgctggtggtgctggtgcggcagatcatgctggccaactacgagggcgccttcttctgcattctcacgcttctgctgctctacgtgcccagctggatccaggtgaagctgcggatcgagctgccgccgcccctggagatcaccattttctgcttcatctttgcggcagaaattctgggtgaggtcaacgccttttatgtcgtgatccccggatgggacaccatgctccacaccatcaacggcttcctggccgcggcggtaggcttctccatggtgatgctgctgaacgacgatgaccggatcaccttccatctgtccccggcgttcctggccctggtggccttctgcttctccatgactatcggggtcctgtgggagttctttgaattcggcatggacttcttcctgggcacggacatgcagaaggacacggtcatccacgccatccactccgtctccctggatcccacgctctccaacaaggtggtgacgattccggatatccaggacgtggtcatcaacggagagagcctgggactgggcggctacctggatattggcatcatcgacaccatgaaggacctatttgtgaatttcatcggtgccgttgtgttctccctctccggcttcttcttcgcccgcagcaagggccgccggaagagcgccgcccagggctttgtccccagcaaaaagaccgcggagcaggactatctccagcaggcgctggaagaggcggatcaaaaggacgcggacgcccccactccggatggccccccggcgccgggagaaccggagggtgcctgagcgccccacacagacagaaaaccaccggccgaagccggtggtttttcgcagcagcggccggcagatgccggccgctgctttttgatgtgacagggttcagtcgtccagctcctgctctgccttgacaattgcgccggaggaggcgtcgatctcatagctgtactccgtccggcccacatggaactccacctcatacaaggtccggccgtcatcccggtccaactccacctggatgcgggaggcgtcgctctcactgacgccggcgtgggtcaaggcagcggattttgcagccgcctcgccaatgtgggggccggagctgccggatgctgggacactgtggctctcccgctcgcttttcagcacggcaccggtatagaggtcgatctcatactgatactccgtggtgcccgccaggaactccacctcgtagcactccgcccgcccgtcgtcgtgctccacccagcagcggagatagatggtgtccgcttcgctgacgcctgcgtgggtcagggcggcggcagtggcggccgcctcgccgatgtaggagccggagctgccggttgttccgccggagatgccgccctcccgggagaaattcaccacctcaccggtgcgggcattgatgtcgtaatcatactctgtgccgccggcatagaactccacctcgtagaccatcaggccgtcctcgctgtcgaactcgatctccagctgggccacgctgctctcggcgatgcccgcatgagccagggcggcattttgggcctcctctgccgtgatataggcctttgtgctggcggtgcccgtctgggtgacggcctgggtggtcagatgccgggactcggcgatcaaggcgatctcattcaccgacaggggtgccagggacgcaaaggtcagtgtgctgtcctgagcgatcacctcctggatcagggatgccttgcctacggagatgccgtactgctgggccagagcattcagatccgcgctctccgtcactgtctggctgaggacagccccctccagggaaccgccctggaagacgctgttgatggtatccgtcaggtgctgctggagctgggcggattttgcggcgtcctggttctccacggacaccaggatggcgttctggatatcgctgagataaccgttttggagcatggagccgatgagggcgttcactgccacgtccaggtccgtgccggtcagatccatgtcgcccaggataacctctgcgtcctggttgaagggggtgacggagagcacccgctccttggagctgacggtcatggacaggctggggttcacatccagcatcaccacggagtccacggcgttggctccccgccagctgctgatgccgaaagcaccacagcacatgaccaccagggcggcagccactgccaggggcgcccagcggcgcttctttttcggagcctcaaaagggaggacagttcccgcttgcgggccgcaggcggccaggatgcggtccagcggatcaggagcggcgtgctccacggcggtccgcaggcgctgttccagttcacgttcgtccaagtcagtctgcctccttccatgcgagttggagctttttcaaagcccggctgtatttggagagaaccgtggggagcggcaggcccagcagagcggcgatctcccggtgccgcaggcctgtcagcgcgtggagggtgacgatctgccgctcttcgtcactcagggcggagagcacggcctccagcatcatccggtcctcatgggtcacggcgggattgtccgccagacggtcctgccagtcctcctgaaccaggggttccgtccgcccgtgctcccgcaggcggctgatggccagattccgggtgatggtcagcacccaggccataggcttgccctgcctgcggtatccgccggcagcgttccacacctgcaaacaggcgtcgtggagaatatcctctgcgtcgtgggcgtttttgacgattgacagggcaaagccgtagacggcaggacgggtgcggctgtacaaatccgccagagcgtccttgtctcccccggcgatgcgggcgatacagtcctccagggcggcatccgcgtctgggtccggctctgccacggtcatgcagaatatcatggggcttcctcctgttcacacagacaacgcgccggcggcgcgtttgattgcactgcggccgaagcatcaccggccgcgcccccatgatagcacatcctgcagaggtttccaaccccgggccgaaattttccggaagggcagctgctccgccggatcagggcagcatccggtccgccgccgtgatggggcggatggggcggcaggggacgcccgcagccaggactccggcagggatgtccttcgtcaccacgctgccggaggcgatgaccgccccgtctccgatggagacgccgggcatcacgcggacgccgccgccgatccagacgccgctgcccacacggatgggataggcgtactccagcccctgggcccgctttgccgcgtccaaggggtggccggaggtgtagaatccacactgggggccgaccagcacgttgtctccaaaggtcacgccgccggcgtccagaatgacgccgccgtggttcatgtagaagttccggcccacactgatattccagccgtagtcgcaccagaagggcggctcaatccgcagtccttccccagcggcgcccagcagccggcgcagcagcatctgggcggattcgatgccctccgcctgataggcccgctgattgaactgctggcactgagccttgcaggcagccagctccgccagcagggtctcatcacgggcgggtgcgtacagcattccccgcagcatcttctccttttccgtcatagggtgattcctcctgtacaggcggccccagggccgcagttcactctgccattatacagaaggcgccctccgggtgcaagagccgccgtcggttcagccccggggatactggctgctgacgctctccagctctgtgacggagccgaagccgctgatttcgatgtcgtaccacgtgtccccgttgatgatttcgtagctgtactcattccaaaggccctcactactgacctcctgtgagacgatctccccgccgccgacggtatccagcgcgatctgttgagcctccgcactgtccacccgcagcgccagcacagcggccacggccgcgacggccagtaccgcagctgcacccacgatcatggcgacgatcttcttcacagacatgtttttcataaaaagctcctcctgcttgttgtttcggattcatggttcctgtttgtgtcttctgccctgataacgcgcagacaacggcttttattgcatggcgggcgaaattttttcttgacaggatcgcctaaagccgccactgtgagaggcagaaaggaggtgaatttgatgaaatataaaaaatttggaaatatcagccctatcgaaccagtcggcgggagcaagactatcaacaggttcaggaatttctgaaaagcggcgatcccgaactttggaaggcgctttatgagagtgcctatgaaattgtataccagtgcgcgtacgggatggatttttgccgcgtgctgggacctgatgattactgtgagattgccgatgaggcgtttgccctctgttatgaacagctggaccgatatcaggggctcagccagttctccggctgggtaggcgggtacagcaaaaacattacccgcacccgctgtcggcaggtgttgaccggcctacggtatcgccggcagctctatgaagtctccaccggacggatgcgggattgggatcccctgtggatcctgattcgtctagagcggtactattgtctctggaaagccatctccgacatctctgaaacaagccagcggattctggaggctcggattttggaaaagctgtcgctgcgggccattgcgcaggaattaaatctgacacagcgtgaggtaaaaacgcgatatgaagccgcgtgcaatgtggtccggacgcgcttcctgcgctattgcacggagaaagtagagttttaaagtgcaggaatcccaactattcatgccgaaaggagtgcaccaaatatgcacaacgataaaaaagcgtatcaagttgatcggacgccgacagaattgctcagcgatctgctcgtccagttaaaatttttaaggcaggaatgcctccattacgatgcaggagactggtcttacggtgcgcagattgcgaccaagctccggcttttgctccaccagacaaaatattctgattccctgctggcccaaattacaaagcgttttgcattcagctgtccggattttctcagtctgagcaccgtgcggggcgagctgcccaataaagggaggaccgattttgtccgctccccgctcattcagtaccagatgattcaccagccagaagtccctccggttctgacggtgcagcccctgtctctggaacccggaaagcgatatgccaaacgggcattcaagacctggtggaatgggattgacattctcctgattgaccggcagcactttttgaaccgtaagggcgtagtgtgtctgctggcaaaccaggagggcggcgcccatgtccagcccggcatggacgaaaaggcggctatgttacgccggggagcggcaaattccctgcagattgccgccccgctgccggacgggctgacgcggatatataccgccgaaatcgaccaggtactggcagccgttgtgcgcaccattgcggcggagacactgtatacatttgagcatgcaatcctgccccgctgccaaatcgccctttctgcagatgaaaaagactgaagcgggtccgggagccgcgccccggcggcgttgacttttccgctgctttccggtatgcttttgctatcctgatacaaagggggcgccgcgcatgccggacctcacttccctgttcacagacacgctggccaagttctccttccgggcggtcctctccgccgctgccacgctgctgatctgcctggtggccgtccacctgctgggcaagctgctgcggcggctgctggctaggacgaagctggacgagcgcatccagaaatacctgctggccggggtgaagctgatcctctatatcgtcacggtgctgatcgtggcggagagcctgaacattcccatgacctccctggtggcgctgctgtccgtggggtccctgggcgtcaccctagcggcggaggacatcctgggcaatgtggccggcgggctggtgatcctctctgcccaccccttctccatcggggactatgtagaggtcggcggcgtggccggcacggtccatgagatcagtctgaaccacaccaagctggtgaccccggatgggcatttggtgatgctccccaacaaggagctggcctcctcccagatgaccaactacaccgtattggggcggcggcgggtggtgcagcgggtgaccgcctcctacgacgcccccacggagacggtgaaggccgcctgccggcgcgctctggagcagacggaaaacctgctggaggacccggctcccaccgtctacctcaccgcatacaaggagagctctatcgagtacaccgtctactgctgggctacgccggagaactggtggggcgcgtatctggctctgggggagcacctgcgggacgccttccgggagtacggcgtggagatgacctacaaccacctgaatgtccacatcatagaaaaccaaagctgaccgcgggaggcgctccaggcgcctctgtatacagcgacgcccggtccgggaaatcccggaccgggcgccgtcttttggggtaaatgccgcggaatgccctgcatgggacacggatgtggtgggtctccccgctcatgcggttgacttccgcccgcagcgccatcttatcccgctgcgaacgagatggccggcgctcaatacctgcccgcccagtccgccagcagcaacaccggcagcgcccacagcagcaggaacaccagcagggccagaggcgtcagcagattataggcgccttggaacaccatataaaaggacagcagcgtcccggccacgctgcccagcacggacagcgccgtggcccggcgcacagccttgcacaggcggcggctgcctaccaccgcttccgcatagggcagcagtccttcccgaaacagcagggcccggggcatcccccggtccagctccgcctcactgaaagccacccggtccgtcagactggggaactccaccttcacgcccttgtgaaacttccgcttcagcagggccggggtgatgttgggatcccgggacgccaggatcggcgtgatgcggctgcggcgcatcatccgcagggcgaaatccacgttctccgagggctggtacttcacggcaaacactgccgccagctgccggtccatggccaggaagatgccggtccgcaggttgatgccgccgggcaggcgcacctccatcttccgcatgaaggaggccgtgcccagcaataccgactccccccggatggtggcggagtagccgccctcctcataaaagctgaaatcgtccactttctcataatggccgccctcgctgcggagcaggccgtcaaacaaccgctgaaggccgcagtccgccgcccgggccatagaggcggcataggaggaaacccgggacaggtcctccccgaacacctttacgccgttgagctggatcgtacccggcgggaacaggtctccgtccgtcaggatcatggcccgcctgcggctgatcttctccgcaccgcaccagcccgccacggcgcaccccgccttgtgaaagtgccgggccagccgggagaatggcatcccccagcacagaggcagggcaaaggtggtgcctgcccccaggatggcagaccagttcagcaaaaagtcgtccccccgttcctggcccagggagctgagcccggcaaacacgatggaggccatcagcaccaccggcatcagcgcgttctgccacacggcggcggtattctcccgcagggcggtggtgtagaagccggggacggaacccgcctgcttgcaggcccccttctccgtctccgtcaccagataaggcggctcgtcatccgtggcggccatgcggaaggtgtcccacagtccccggctctcccgggctccgccccacatggcaaacaccagggcgaggcaccccaccggggcatagcaggggacggcgctccgctccggcagcaccagccgggccacacagtccgccgccatcaccacggcggagaccaccgccagcagctcgctggtgcatcgcttctgcagcagcgagccgaacgccttggcgaatacctgccgggccaggacggccaccgccgcaaggcacgccagcagcacaccgctctggacggctgcgtcgccggtccagtagcggatctcatagccgtaggcctcgatccccatagggatcaccggcagcagcgagatcagtaccgctgccaggatagggtgcttgcgccgcttggcctccgcccggtagtccgccgccgcctcagccagctccggctccggaccgatggtgtcgatctccgggatctcctccggcgcctcctccggttccggcggggcgtagagctcctccgtctccatcaggcgcttccgggagaacaggccccgccggggccgcagcaggggctcctgagcctcctcttccatcaccgcgtccacggtgctgcccaccacatcctccagcgtgatggggtggggagagggcggcagatcctgccgcagctcctccagcaggtcctccggctgggcgggcggcttttggggcggagctgttttttccgtcacctggggggcgggacgcggccgcgcctccgtttgcagaggcggcttcttcgcgccgccctccgccggaggggcggccggctccgtctcccggcgggcctcctgctccacggcctccataagccgctgctcccggcctgcgccgtattccgccaggatctcctccagggagaagtcctcctccaacgccgggacatccgtgcccccggtcagaccgctatcaaactctctctcgtctttggaagccatgctgcccctttcctctccgctgtgtccccggcccttcaggccatccgctggcgcaccgcctcatacagcaggatcgccgcggcggcagaggcattcagggaattcagcttcccccgcatggggatactcaccaaaaagtcgcagttctcggcggccagacgggtcatgccgtccccctcgctgccgatgacgatggcggcgggtcccttcagatccgcgtcgtacagggccgtggtgccgtccgccgccgtgccgaagacccacaccccctgttttttcagatccttcagcagagcggggatgttgggcacccgggccaccggcacgtgggccaccgctccggcggaggtcttggccaccacggcggtgaggcccgcgctgcggcgcttggggatcaccacgccgtgagccccggcgcactcagcggtccggatgatggcccccaggttgtgggggtcggagatctcgtcgcacaccaccagcaggggggctcgcccttgtcccgggcggcctgaaggatgctctccacactgacgtactcccggaccgctgccagggcgatgacgccctggtgggcatgggtgcggctcatggcgtccagcttccgccggtccgcctccaccaccaccacgcccgccgcccgggctttggaggcaatatgtcccagggtcttgtccgtctctcccttctggaggtaaattttgtcaatcgtctcccctgcccgcagggcctcaatgacggcgttgcgcccctcgatgatgccgtcggcctcggcagtcaggtcctgctttctccgttcttccataacttctccctcaatctgagtattttcgcattcaagaggtagtatagcataggggcgggagtctggaaagtggaattcacagaaaatttatagaaaaccggttccttgtccttgtaggcctgcggcttctgtgatatactttataaatcattttaaggcttcggcactgtctgaaaacagggctggacgcccccgggcagcggaccgcacccccgtctccggcacaggcgggaccggggcggtcccgtttatcctccgggtattgacaggttttcccctgaaaggagttccatacatgaacccaaacgacaataagaacaacaaaaacaacaagcccggcggcaactggcggggcgtggcctctctggtgggctgggcccttctgctgacgatcatcttcagctatgccagcagcgtcatcggcagcactggccgccaggcctcctccatcaacgtggaatacggagagttccaggagatggtggagagcggccaggtggcccgggtggaattcgacaacgcggaggatatcctcctgataacccctgaggaggggtattcctacaccgctgaggacggcaccgtctacaccaagacggaggacggctacacttatatggacgccgccgggcaggagcagactgcccacctggagctgttcactgtccggatccagtccaatgacgccgtcattgatttcctgaacgagtatggggtggagggcgtcgacaaggagtatcaggccccggtgaacccggtgctggccatgctggtgagctacgtgttgccctttgtgctgatcttcctgatgttctccctggtcatgcgttggatggcgaaaaagggcggcatgggaggaatgggcggcatcggcggcgtgggcaaggccaacgccaaggtgtatatggagaagtccaccggcgtcaccttcaaggatgtggccggccaggacgaggccaaggagtccctgacagagatcatcgacttcctgcacaacccccagaagtacacggagatcggcgcgaagctccccaagggcgcgctgctggtcggccctccgggcaccggcaagacgctgctggccaaggctgtggccggcgaagccaacgtcccgtttttctccatctccggctccgacttcgtggagatgttcgtgggcgtgggcgccagccgcgtccgggacctctttaaggaggcggccaaggtggccccctgcatcgtgttcatcgacgagatcgacaccatcggcaaatcccgggacaaccgcatgggcggcaacgacgagcgggagcagacattgaaccagctgctggcggagatggacggctttgaccccaccaagggcatcattctgctggccgccaccaaccggcctgaggtgctggaccaggcgctgctgcggcccggccggtttgaccggcgcatcaccatcgaccggcccaacctggcgggacgcattgccacgctgcaggtccacacccgcaacatcaagctggcggaggacgtgaatctgaaaaaggtggccctggccactgcgggctgcgtgggcgcggaccttgccaatctggtgaacgaagcggccctgcgggccgtgcggaagggccgcaagctggtgacccaggaggatcttctggccgccttcgagctggtcattgccggcacggagaagaagggcagcgtcctcaccgagtttgagaaaaagctggtggcctaccacgaggtcggtcacgccatggtggcctacaagcagaaaaacaccgagccggtgcagaagatcaccatcgtcccccacacccagggctctctgggctacaccctgctgatgccagaggaggacaagaccgaactgcgcacccgcgacgagctgatggccaagatcatggtctccatgggcggccgggcggccgaggaagtggtgatgaacaccatgaccaacggcgccagccaggatattcaggacgccaccaacgtggcccggaacatggtggccatgttcggcatgagcgacgagttcggcatgatggcgctggcctcccgccggaaccaatacctggacggcggctacggcatggactgcgcccaggataccgccgcccggatggaccaggcggtgaaggacatcctggaccagtgctaccagcaggccgtggaggtcatcaaggccagccgggaggacatggacaaggtcgtggcctacctgctggagaaggagaccatcaccggcgcagagatggtggctatcatcgagggccgggacccggagctggtggagaacccctacgcctccacccgcgcagaggacaaggcgttccgcccctcctctcccgagaccattgaggcccctgccaagaaggtgcacatgatctcccagaagatcgaatcccccgaggagcccgcccaggagggacagccggagaacccggtgtccgatccctccccttccggcggagacgcccccaggagagcggttccactccgtctgagccgcccaaggacaccccgtgatccccgatcatccccgcgaggcgcgctgaccccagcgcgcctcgcttttcccatcgccactacatcaaaaaggagaatcgccatgatccgactcgccaccccgcggacctgtctcaggccgcagatatctatgaggagatcctggaccgagaggcacagggccccgtctataccaactggcagcggggcaaataccccaccatcgacaccgcccgccaggccctggaggccggcaccttctacgtgggcgaggagaacggcgtcctctggggcgtggtgaacctgaacagcgtccagctgccggagtacggcgccatcccttggaccatccccgccgctgcggaggaggtaggggtgatccataccctgtgcatccgtccctcctgctccggccggggatatgcccgacagatggtggccttctgtgaggcggaggctcgccgccagggccgtaccgtcatccggctggacacctgggaggggaacctgcccgccaaccgcctgtacccctccctgggctaccgctacgccggaacggcggagttcttcttcatgggctttgtgcgggagaatctcaactgctacgaaaaggccctctgaatccattgagacgcaagggcttttctcctctgctaaccgtgggttgacagatttccactccccagttggtggcctgggggcaggctgtctgctagtctgacggcgaaaggaggcgagggatgtgaccattgggcagcgcatcgcgcagaagcggaaggagctggggctgtcccaggaggctctggggagcaagctgggcgtctcccgccagtccatctacaaatgggaggcagactccgccctgccggaggtcgacaagctgatcgccctcagccgcctgttcggcgtctctgtgggatggctgctgggcgtggaggaaccgccggaggcggatgccgctcctgctgaaacaggcggcgggctgacagaggcccagctgaagatggtggaggagatcgcaggccgctacattgccgcccagccgtcgccccggaagcgccgccgctggccttgggtgttggcggcagcggcgctgtgcctggtgctgttccacctcttcgaccgtctggaccgaatgaacggccagtatgtaaatctgcagaacagcctctaccgggtggagtccagtgtgtacggccagatcggctccctctccaaccgggtggaggagatcttgaaggcccagaacagcctggtggcggactgcggtgtggagctggaagccgtggaccttgccgccaacaccgtcaccttctccgcctatgctgtccccaagacctatgtggagggaatggctgtggagttcctggcggaaaacggcgagactgccagcgaccggctgggcagtgtgggagaagagggccccaaccaacggttctccgccacactctccatccccttgacggaccatatcaccctctcggcgctgctggtcccgccggacggcacccgccagacccagctgttggaccagtttgaggggctgtacagcgcctctctgccgcaagtggaggtcaacagcgatctcatgtggatggatctggaggacagcacgctggtcctgaatgcgtccagccacgagcgctatgtttatatccgtgaggtgacaccggctgatgcgtctctcaccgcggccgtggcaaatatccgggtgggcctgttcaaaaatcagaaactggcagcctgggcagagccctgtgaaaagcctgacagcttccacggctttgaagaatttgatttttaccagctgccggagctgcgcctctccctcacgcctgcggatacggtacaggtggctgccgtggtgacggatatctatggacgggtcacggtctcccaggatgtgccctacattctcgatgagagcggagatgcgctgacttggccagacagcagtgagacagatcccgatcccgcccactggcagtacggcggatgaccgccgcgcaaattgtttccggattttgaacattttgtgaatgaaatcatccgtttttgaccagtctgtaaacaaagtatgaagctttcccccaggctgttgactttcccggctgggggcagtatgatgagcacaacaagcaggaagcttgtgacacacatcattttccctctcctttctctatatcatacagacgccggggcggtccgaaaggaccgccccggcgccgtttttctgctgtccctgcccgattattgctttttcatttttatcgaaaaacaataaaaaataattgacaaacaataactacacgtggtacgatacggaaaaaggggggaattcctatgccgtccagccgtctctggcgtgttctgctggcgctgctgcttctggcggccctgttctgcgttcccagtctggtgctgacaggcagcgaatggctgccggagctgacaggcgcggtggagaactatgtgcccttctggaaggggctgcttcggttcctgattttctgtgcctggtgctgggtgtggctctggacagagggttccgcgctccagatcctgctggcgcttctcctgcagttctgcggcatctgggccttgtgcctgctgcgtccccgtccggccagccgggcccattctcacgcataaggaggaaagcgaccatgtccaacagtactgtgcaaatactcgcccgggtgctccgggtactgctgatcttcgccctactgctcaacgtcctggctctgctgctggttcccgcctccgtcatggtcaacgcggaaaacctcttcggcggcgccggcacctttctgcatgacctgttccacccggaggcggacgatgtgaccgccgcaggcgtatccgcgatttttctctcctgggtctggatatggggcgagggcgccaacgccctaatcgccctgttcttggtgatctgcggcatctgcaccgcgctgattctcctccaggggctccgggtgctgggcaccatcctccagggtgcgccgttttccacgcagaatgccgtcagcctccgacgggcggctgtatgttccttctgcatcgcgggagcggcattgctccggacgatctgggggctgtggttttaccagtccctccgccccctggccacctacaacgcgctctttgtgccgatcttcaccatgttcggcctgctgtgcctggtgatgtccgccctgttccgccaggcgacggagatgaaagtggaaaacgacctgaccatttaggaggaggcccacgccatggttcgtactgctgtccaaaaaatcgcggatgtgttgatttttctctgcggtttcctcatcttttgcgacattctgctgcttcccctgacaccggccctggcctacttccgctttcagaatccggcgtccatgcgcttcgaccacctcctggctgttttcgcctacgactttgacgacggggtgggaaatttgctggaaattattttgaaagagtcttggaagtccccggagaccgcggtcctggctctattcctgcttttggcgggcatctgcggcgcagtgatcctggtccagggcatccgtctgctggcctctgtggcggacggcacgccgttctccccgaagaacgccgtctacctccagcgggccgccgcaggctgctttgtgatcgccgccggcgccctggggcggaccgccttcaccctctgccgggatggcgccgccgcattgctgtcctacaccgctttgttcatccccctcttcaccatggcgggccttctgtgcctggtgatggccgggctgtttcaccgggcagcggagatgaaggcggaaaacgacctgacgatttgaggtgacggcatgattgtagtcaacctggacgtgatgatggccaagcggaaaatgtccctctcccaactgtcggagaaagtggatatcaccctggccaacctgtccattctgaaaaacaacaaggccaaggccgtccgtttctccacgctggaggccatctgcgccgccctggactgccagccgggagacattctggagttcgtgccggacgaagaggcggaaccatgaccgccaggcgcacggctccgccccgccaggagcgggcctgcatctgccgtccccgcattttccctgctggcggcgcagctcttcccgcccacgttcttcagcgccgcctggccgggagtggtattggtcctcctgctggggtggatccctgtgtccttctgcccctggtatctctggggatccgcctctggagccgggcagatcgcggaagatgggacccagtgtactgcgggacatcttctgcggattgtatccggcggcggtcagtctgccgatctgccccggaaggccgccggggccgttgcggtatctcataacgccgtttcggatactccttctgatgctgacgcgataaaggctgcgcttttggaatctttactgttggaggtttctcgcgatgtttcagctttcgctgtttaccgagttcggcaggctgtgcaacccctttgactatgttttggggtttacgttcctgctgatggcctttcacctgctcttcctgctcttcaatctgcgggagcggcagcgggtgaagctcttctgcctgggcagcgcctcgctggtcctgctgctgcatattgcggcgctgcggctctcgttccagttcaccaatctcacctttgacgctgtggagaccggcccggcgccgggcctgctggcgacgctgggcagccgtacctggctgtatccactcttcctctacctgcttctgctgcccctggtgtgtgtcccgcccaggcaagacagttccccggacaactccggtttccgcaaggaggtggacgcatgattgatgccccattctgcaatgcggtcagcctgctgacgggctttaccggctgggtgctggcggtgtggtcctttctccgtcctgagagggaccgctccggctggaagctggccggcggcgggatggcctgcgccctggccctgctggcccagctcttcgccgtgcagctggagaccgtggcgggtgatttggaaacggccctggtccaggcctccggcgcagctatcgccggccggatcctgtttgtgataacgctgatctttgaaaccatggccgtggtgagccaccactttgccgccagagaccgaacgtaacgtgcattgactgtccctgctgtggagacagccccaaaaaaggagaacccattatgaatgaacatgaaaaagccctgccggcgggagggccggcgaagcttacgcaaaatgcggtgaaaatttatgtgatctcctcccgagagcgactgcttctgccgctggccttctgcttctgtcttctgctggtgaacacgctgctttggagcggccccaccgcgggactgaccgcctccgtctgcgtctggtacggcctgctggggctctatctgggccgccccctgctgaacacctgggagagccgcgttctgctggcggtgaatctggccctggccgccacgctggccctggggtccaactggtatttccgggcgtggaatctgctggccctgctggccctgctgcccgtccacgccatcggcctctccggcggacaatttctgccctggtggcgtccctccatgctgtgggagcggctctgtttgctgctgtggggcctcttcggccatctgggggcagcattggccaccgcctggcctcagaaaaaggacggcgccgcccggcgggtcctgcccctgctgctgggagcggccggcgccctggctctgctggcggtcctggtgcccgttctggcctccgccgacgcgctgttcgccgccgccacggcggacctgcgggcctttgtctccctccacttcacggacgcggtctggaaggccctgctggccagcgtcatgacccccttcctcttcggtctgctgtacagtctccgccgccccacacccctgaaacggaccggagccgcagcccgcggcggggtagacggcctgggcttcgccatcgtgctggcggcggtggcggcgctgtacctgctgttcctgggcgtccaatccgccggactcttcggcggagctgagtacctggcccaaaagggcctttcctatgccgagtgggcccggagcggtttcttccagatggtgggggtgacagtggtgaacctgacgcttctgctggctgcggtccagtggtcccgccgggagggcggcgcttggcgggcagtccggctcctctccgccctgctgacagcggagagcctgctcctgctcctctctgccgcctggcggatgacgctgtatgtggatgtgtacggcctgtccttcaagcgctgcatgacctactggggcatggggatgatggcggcctttctgctggctgcggcctggaaggtgtggcggccagacttccggttctgtcgggtggtgtttcccctggccctggcggggtggctggtcatcaactgcgtgccggtggactacctggtggcaaaggatcaggtggaccgctacctctccggggagagcggggtgctggacgcggagtacctgctctatgacctctcctatgacaccctgtcccagctggagcggctggacggagacatggtctgcacagcgtatggggactgggacgccatcggtacggcccgcctgtccatcttattgaaacagcggcggcaggaggcccggacagactgcgccgactggcggacctggagcctctcggcctggctggccagccggggcgacgcgtaaggggtccgggcatgaagcgctatctgcggctggccgcctggtgcctggggcttgcgctggccgtaacagcctgcggcagggcgggccggatcgtcctcccggaggcggcggaggtcactgccatccgggtaacggcaggagatgcggtgacgctccacacggaccgggactggatcggagaatttctccaacaggcggcagaggctgtctccaccggcatggagagcgtgcaggacgcgccggaccaaaccggtgcggtaaaggtggagctgggcaccggcgagacgccggactggagcgttctgtacgtctacgaagcggacggcatctgctgtttggagcagccctatacgggcatctaccagggggacgaggcactctggacagttctggcggctgacgccgcgccggaggggaggaatccacagtgaacaggccgtcggccggttggatcgtgtgcctgctgctctgcggcatgttgatcgccggggtgttctatctgatcggctacaaggccgcctatgaccggatggaaaacaccgtgccgtccacggtggaggtctcagttgcatggcagaaggtgagtccatgtggaagctgatgggcgggctgctggcactgccggtcctgctggttctgtcggtcctgatgatcttctggggcagcggcgattatgtcagaaccgttcagctcaactgggagctggagctccccgccagcgagggctgtctgtatgagaccgacagcggcgccagctttagcggggacggggagcggtatcacgtcctggcatacgcggacgacagcgggctggaggaaaccctgacagaggaagctacgccggtcaggtccgcagaagtgccagtgaccgaaatcctggatctgctggccgttccggcggaccagcggcccgatttttcggactgccgcggcttcacggcggcgcacccaacggatgaacgcaaccggctgtacctgctggtaaacagcgcaggtacccggctgtatgtggtggagtgctttttttgagcagaaaaacagcggcggccatgggtttccatggccgccgcttggcggtttcgcttattcctcatctcggccgtggccgcaccagggacagaccggctgtgctgccggaaaccattttccgcaccaggggcagggctgatcccgccgggtcccgcacagggggcaaaaggcatcgtcacggggatgctccttgccgcagaccgggcatttgaccagctcccccgtaccgggaacgtagaaggcggcggtgtccacgtctgttggttccggctccaccggcacatgttttttcggctgagggagaaagttggtgcggaaaaaggccagtcttccacaggcggggcagctgtatatatccacctcaatccagtcggtgacggaggcaaaaaggcccgtcagagccaggcgcctgcccgcctgccagaggtccatctgccccccccgcactgggggcaacccaccggcgtgttcggattcatctcccgcacctccgcatgctcacatccgcaggctctccggataatctcccctggcatggagcttgcggagctcctccgccacgatctcccggtcctcatggtaggtcatgccgaaccacttgtccgcggagtgaaggacggacacctccagcgcgcccttttgcagctgatcccccaccatcaccggcagcaggcactcggccttgatattttccccggcctccgtgcggaggaagttttcaaagtactcccgcagggcggggaagatgctgggggcaaacccccagaagttcatggacaccaccgtctccggggacaggtccgtgccctccgccagatcccgcagcgtgccgtcgggatacagctggatcttcagtgcctcccggacggagcggagctttccgtcctccaccgcgcacacgccgcgggacaccgtgccgtggaggctggcggtattcttcagcagataccccaccatggtggcctttcccgtctcaggcagcttcaccagctcgtcatagatggtgcggtaggcgtcaatgccgtaatagtcgtcggcattgatgacgcagaagggctcgtgcaccacatccgccgcgcacagcagggcatggaccgtgccgaagggcttggtccgctccggcggaatccggtagaagtccggcacggaggtaaagtcctgaaagacataggccacctccaccggcgtgccgtccagtgcggtcttcctcgccagataatccccgcacaggcggcgcatcatctcctccatctccggcttgatgatgaacaccaccttgctgaaccccgcccggagggcgtcgtagatggagtactccatcaggatctcgttgtggggcccgatgccgtccacctgcttgctgccgccgtagcgggacccaaggcccgccgccatgatgaccagtgagactttcatttgcttctctcctaaagtttttgtgaatttgcgccttgttgcgcaaccatacgctgttcttttaccataccctatttgccggatttttgcaactgctcttgacttttttcctctgcggtctataatatgaaaacgataatcattttcagattaaaggaggcattggatgccatacagcaccaaacagcaccaggcggtgctccgctgcctggaggcccggggcgagaccgcctgcaccgccgccgaactggcggaggacctgcgtcgggagggctgcccggtgggcctggccaccatctaccgccagctggaaaagctggaggccgccggggcggtccacaaggtcaacaccgaggagggcgccctgtaccagtactgcggccgccagtcccaaggccaccgggattgctttcttctgaagtgtgagcgctgcggccgcatccgccatgtggactgtacccgcctgcagaacctgtacgaccacctggagcgggagcaccacttccgcatcgatccccgggggacgctgttttccggggtgtgcgacgtctgcgccggagaggaggaccaccatggagcccaatgagctgatcgtctgccgggacgcgtccctggggtatgagggtcagagcgtcctggcccacctggatctcaccatccgggcgggggactacctgtgcatcgtgggggacaacggctccggcaagtccacgttgctgcggggcctgctggggctcctctccccccagtccggggagattctccgggcgccggaactgcggcagggagccgtgggctatctgccccagcagacccgggcccagcgggacttcccggccacggtgtatgaagtggtcctctcgggctgcctgaaccagaaggggctgcggttcttctacaccgccgcccagaagtccgcggcattgatgaacatgggcaagctggggattctggagctgaaggaccagagctaccgggatctctccggcggccagcagcagcgggtgctgctggcccgggccctgtgtgccgcccgcagcctgctgatcctggacgagcccattaccggcctggaccccgccgcggcccaggatctgtacaagaccctctcctacctgaaccggaaggagggcatggcggtggtgatggtgacccacgatctgagggccgccctgcgcagcgcccggacggtgctgcacatcggccacagcagctactttttaggcacagtcaaagactatctggcctccccccaggggcggcggtttcgggaggtggaggaatgagcctgaccttgatgctgacctatccctttatgcagcgggccctgatcgccgggacgctggtaagcctctgcgccgcgctgctgggagtccccctggtactgaagcggtactccatgatcggcgatggcctcagccacgtctccttcggcgccctggccatcgccgtggccctggggttcactcccctctacttctccatccccgtggtgatcctcgcggcgttcttcctgctgcggctggccaccaatccccgctggaacagcgacgcggccatcgccgtcatgagtgcgtcggccctggccgtcggcatcatcgtcatctcccgcaccagcggcatgaccacggatgtggacaactacatgttcggcagcgtcctggccatgacgtgggcggatgtggccctgtctgcggtactgtcccttgcggtgctggccctgttcgtgctgttctaccacaagctcttcgccgtgacgttcgatgagagcttctcccgggccacggggctgcgggtggactggtacaacaccctgctggccattctcaccgccctgaccatcgtgctggggatgcggatgatgggtgccatgctgatctcctccctggtgatcttcccggcgctgacggccatgcggctgttcaagagcttccggggcgtggtggtatgtgccgccgttacgtcggtgtgctgcttctgcgcgggactcatggcctcctggacgctgtccacgccggtgggagcctctgtggtggcggcaaatctcgcgctgtttctgctctcctgtgctgccggctggctgcgcaggcgctgaaaaccgccggatctgcggctgtgccgtatatccggcggatttttttatacaatattagaaaagaatctggcagaaaaggcttgcgcttttccagtatctgtgctatgatgcgtatgttagaagagtaaggtatgtggagtgggctgcggggtccgctctttttcttgacctttttcggtcaggcaaactctgcttaaacttccaaaagaagggagtcctcccatgaaaaagatcactgaactgaccgcggaactggccgctcccgctatcgcggaacagggctgcaccctctgggacgtggagtacgtcaaggaggccggcacctggtatctgcgcattctgctggacaaagagggcggcgtggacattctggattgtgaggagatctcccggaaggtcagcgacctgctggacaaggccgaccccatcgagggcagctacaccctggaggtgggctccgccggtgccgagcgggcgctgaagcggccctccgattttcagcagtttctgggcagccccgtgctggtgaagctgtaccgggcccgggagggccggaaggagtttgccggctatctgaagggctatgacgaggccaccggcgatgtcaccgtcaccgtgggcagccaggatctggtcttccccaagaaggagactgcccttatccgcctgcgggtggaattttaaccaatcaccgtcccgacaagacgtattttatcaacaaggagaatcagcaacatgaaaggcaaaaagcagaaggagcccgtaggcttcaatcccgcggaaatcttcgcggcactggctctgctggagaaggagcggggcatcccccagtccttcatgatggagaagattgtccaggccctcaccaccgcctacaagcgggaccacgcggatgtggagaacgtcatcgtggatgtggacgaggcacaccagaacctgaagatgttcgtccagaaaaacgtggtggaggaagaggactacgtggaccccgccaacgagatgcccattgaggaggccaagaggctctccgccaagtacgaggtgggcgacatcgtgaacatccctgtggacacggtggagttcggccgcatcgcagcaggcaacggcaagcaggtcatcatccagggcctgcgggaggccgagcggggccaggtgtatgatgagttcaactccaagcagcatgagatcctcaccggcgtagtcacccgtgtggatccccgcaacggcaatgtgtccctgcggatcggcaccggcaccgactctaccgaggcgctgctgatggccggtgagcaggtccccggcgaggatctgaccgaaggcatgcatgtgaaggtctatgtggtggaggttcgccggtccacccgcgggccccaggtgctgatctcccggacccatccgggcctggtgaagcgcctgttcgaactggaggtccccgagatttatgacggcaccgtggaggtgaaatccatcgcccgtgaagccggcagccgcaccaagatggccgtgtggtccaacgacgagaacgtggaccccatcggcgcctgcgtgggccccaagggccagcgtgtgggcagcattgtggaggagctgcggggcgagaagatcgacatcgtcaagtacagcgaagacccggcccagtttatcgccgccgccctggcgcctgccgacgtggtggatgtgtggatggcggacgagggcaaggcctgccgcgtcatcgtgccggatgaccagttgtccctggccattggcaaggagggacagaacgcccgcctggcggcccgcctcaccggctacaaaatcgacatcaagccggagagctatcacgacgaggaagagccccctgccgggggcgccccggaggccgcggacacggcggaagcgtccgctgtggagcccgtggacgcggagtaagatcagtttatcagaaaggcggcctatgagatgccgaaagtgaagaagattccccagcggcagtgcgtgggctgccgggaaatgaaggataagaaggccttgctgcgggtggtcaaggccccggacggcaccgtgtccctggacttcggcggcaagaagcccgggcggggcgcctatgtgtgccacgacgtggcctgcctgcagaaggcccggaaaacccgggccctggaacgggcctttgacaccgccatcccgccggaggtctacgacgccatggaggcagaactgcgaggtgcggatggaccggcttaacattctgtccctgctgggtctcagcctgcggggcggccggttggccgtgggcgaggagccggtagaggccgtggcccgcgcccgggacgcccgggtgctgctgctggccgccgacgcggcggagggcacccgccgccggtgcgagcacttcgcccaggccggtgactgcctgtggctccagctccccttcaccaaggcggaactgggccgggccctgggccggacggccgtggccatcgccgcggtgacggacgtgggactggccgccgccctgctgcaccggctggcggagctggatccggagcagtacgccgacgcggcggaccggatggatgtaaaggcccgccgggccgcggagcgccgggcggagcaggcggcccatgagaagaatctccgccagggcaagcgccgccgaaaggcgccgcctgcaccaaaggcggccaaacctccggcggaaatgccaccggagcgtgcgccagacgggaaccgtccccgcggcgcaaagccataccgatcccgtcccccagggacgctcgccccaagccgaaggcacaggcgcggccatacgccaacagccgcccggtgaaaaagggcaaaggctccttccgcaagaaaaaggaaggctgacggaccgcgccgccgcggcatgtgtccgcggcagctatttgaaaaaatttcccagccctcgggttggagcagaacgaggtgtttctattgggtattgagaaatacagagtccatgaggtggcgaaggatttcggccttcccaccaagaccatcacggagatcctgacgaaatacgccgagactcccaaaaaccacatgcaggcgctgacagatcaggagctctctctgatctttgaatacctgacgcagcacaatccggtctccagcatccaggtgatcttcgccgacacctacaaggaggagcctgcgaaggaaccagccaccaaaaagccagagcccgccggcaaggccgccgcgcccgcccagggccagcaggtcaggcagtctgtgcctgcccagagcgcgcagagcagccagggtggccggcagcagccccagcagcagaacgccgcctccaagcctgcggcgcagcagccggtgtcccgggtgccccagcggaagatcgtggacacccgcaagggcggcgacgtgaatctggccaagtatgatgagcggctggaggatctgggcggcgagcggggcgctcggatgcagcggcagcagcgcagcggcaaggagaagatccgcaccaacaaccagcgccggggcggcatgaccttctccaacaagcgcaagcaggacgaggcagagcggatgcgcaggctccagctggagatcgccaagaaggcccctgtgaaggtcatgatccccgatgagatctccgtgggcgaactggccagccgcatgaagaaaaccggcgcagaggtggtcaagtgcctgatgaagaacggcattatggcctccctcagccagatcattgacttcgacaccgccgccatcatcgccgaggagatgggctgcaaggtggagaaggaggttgtcgtcaccatcgaggagcggctgattgacgaccacgaggacaaggcggaggatctggtgccccgggctcccgtggtggtggtcatgggtcacgtggaccacggcaagacctccctgctggataccatccgccacacctctgtggcggccggagaggccggcggcatcacccagcacatcggcgcctatcaggtgcaggtgaacggcaagcccatcaccttcctggacacgccgggccatgaggcattcacctccatgcgggcccgcggcgccatgattacggacattgccattctggtggtggcagcggacgacggcatcatgccccagaccgtggagtccatcaaccatgccaaggccgcaggtatccccatcatcgtggccatcaacaagatcgacagggagaacgccaacccggaccgggtgcttcagcagctgacggagtacggcctggtaccagaggactggggcggcgacaccatctgctgtaggatctccgccaagcagaagatcggcatcgaaaacctgctggaaatggtgaccctcaccgctgagatggcggagctgaaggccaaccccaaccggtctgccaagggcaccgtcatcgaggcccggctggacaagggccggggccccgtggccactctgctggtgcagaacggcacactgaagcagggcgacatcatcatcgccggcaccgccgtgggccgtgtccggaccatgatggactacaagggcgcccgtctcacccaggccggcccctccgtacccgtagagatcgcgggcctctccgaagcgccctctgccggcagccccttcttcgccgtggccgacgagcgcatggcccgggagctggtggagcagcgcaaggccgaggagaaggccaaggccgccgcaccggtgcagaaggtctctctggagaacctgtttgaccagatccaggccggcgaacgcaaggagctggccctgatcgtcaaggccgacgtccagggcagtgtggaggcggtgaaggcctctctggaaaagctgtccaacgacgaagtgaccgtccgtgtcattcacggtggcgtgggcgccatcaacgagtccgacgtgatgctggctgcctcctccggcgccatcatcgtgggcttcaacgtccggccggacgccgccgcccgggacggcgcggtgcgccagaacgtggatatgcggatgtatcgcgtcatctatgactgcatcgatgagatcgaggcggccatgaagggcatgctggcccccaagtaccgggaagtggtgctgggccacgcggaggtccgccagacctacaaggtctccagcgtgggcaccgtggccggctgctacgtccaggacggcaagatcgtccgtagctgctccgtccgggtggtccgggacggcatcgtgatccacgagggctctctggcctccctgaagcggttcaaggacgacgcccgggaggtcgctgagaactacgagtgcggcctgaccgtggagaagttcaacgacatcaaagagggcgatatcatcgaggcgtttaccatggaggagattccgcggtaatgtgctgggcctgacgctgtataccgcctctccgccgccctttcgggtcgcagagcggccccgcacggcagtgcgcccaagcgtgccgcggttggctctgcccgccgaggatgtctgattcagagttcctgtgaaacccatttcatggggcgtgcggtatcatcgaggtgtttaccatgaacagcttccccggtaatgggcctgcctcatcagatcgcaatcatcaaccatacttgcaatagccggcagggcgggcgtaaacgcccgccctgctttttcagaaggagcgcctatgagccgcgtgatcctgctttgcgccgatcatccccttccgctgtatgccgcccagacccgccgggtctatttccaccgcggcgtgcggtatgaggaggaaggattttctgttcagccccatgtctactaccgccctgcggtggacaacctggagctgtccatgaaaccccatcgctatgagctggacctgcgtgctacggagcaggacgccgccctgctgcgggactatctgcggcagagctgcattcccggtgaacaggtggagctgtggaacctgtgggtgagcgatatccgggtccgggcctttcgcctgacgggcccgctggcagatctggacgccgacgccctggtgcagatggaggagcgggagcagacctgcattaccctgaccatataagcgctccaaccaagcgcaattccaatgaactcccataaggaggtatctctctatgccaagcaatcgaatcggccggatcaacgaggagatccagcgggagctggcggaccagctccgccgtctgaaggacccccgtgtctcccaggtgggtatggtatccatcacccgggtggacaccaccagcgacctgcgatacgcccgggtctatatcagtgttctggacaaggaccaggagaaagacgtgctgaagggcctgaaatccgccggcggcttcctgcggcgggagctgggacgggccctgcagctgcgatacacgccggagctgcagttcatcgccgacgactccatccagcacggcgcccacatcctggagatcctgcgccaggtggagcggcaggatgaagcccgggacgacccggacgccggcgaaacggaggaatgagcatgctgacggtcccccagaccgcggcgctgctgcggacctttgacaatattctgatcctcacccatgtccgcccggatggggacacggtgggctgtgccgcagccctgtgcgcaggactgcggtctctgggcaaggcggcgtttctgctgcccaatccggagctgacagacaccaccgccccctatttccgcccttacgaggcgccggaaggcttcacaccggacaaggtggtgtccacggacatcgccacggtgggcctgttcccggagaacgccagaccatacgcggaacgggtggatctggccattgaccaccatccctcttttgagtcctttggccgagagaatatcgtccggccggaagccgccgcgtgcggagagctaatctacgacattctgtccgatctgggccccatcacgccggagatggcccttccgctgtatgtggccgtctccacggacacaggctgctttgcctacgccaataccactgcccagacccatgcggtggcggccgcgctgctgcggaccggcatcgactatcagaccgtcaacaaggtgttcttccgcaccaagagccgcaggcggatgcagctggaggccgccatcctcaacgactgtacgttttacgaccgagaccgggtggcggtgctgtccgtgcccctctccctgatggcgcggatcggcgcctcggaaacggatgcggaggacctctccgctctgggtccccagattgagggcgtggactgcgccatcaccatgcgggagctgcggcccgatgtgtggaagatgtccctgcggaccggtccccggattaatgccacggaggcctgccggctgctgggcggcggcggccacgcggccgccgcaggctgcacggtggaggccccctgggctgaggccagggagcgaatcctggctgccgtggcgcaggtggcgccggactatcagcgctgagcgggccgcgttctgctgcccttgaggaggtttttatgcccagtggtatcctgattatcgacaagcccgccggttggaccagcatggacgtctgcgccaaggtgcggggcatcttccacgaaaagcgggtgggacacggcggaacgctggaccccatggccaccggggtgctgccggtctttgtggggcaggccacccgcggggtggagttcgcagagaacggccagaaggaatatgtagccggtctgcggctcggccaggtgacggacacccaggacgtcaccggcaccacgctggagacccgtcccgtcacggcggatcgggcagcactggaagcgctgctgccccgctttctgggagagcaggaccagatcccccctatgtactccgctgtcaaggtaggcgggcagaaactctacgacctggcccggaagggacaggtcgtggaacggaagccccgccgcatcaccatctacgagctggagctactggcccaggagagcgcaacggactacctgctccgctgccgctgctccaagggcacctacatccgcaccctctgccatgacatcggccgacagctgggctgcggcgggacgctgtacgccctccgccgcaccatggcggccggcttcaggttggaccaggcagtgacgctggaggcagtccaggcacagggtacagcgctcctgctgcctacggacagcctcttcgcagagtacccggccctgcctctgacatccggcctgctggagaaacgggtccgctgcggcaatcccatccccctgccgggcacaccggacggcatctaccgcgtatacagccgggaccggcagttcctgtgcctgtcccgggctgcgggcggaacgctgacgtccatcaagaatttctttggagcgtaaaccatgaaagaacgagtcattgccctgggcttttttgacggagtccacctggggcacggcgccctgctgcgccgggccgctgaggaggccgccctgcggggctgtacccccgcggtattcacctttgaccgcccgccgaaggaggtggtcaccggcgtcccctgtcccctcatcaactccccggaggaccggcgggacctggtgcggcggctgtaccgcattcaggacgtgctgatggtcccctttgaccgcgagatgatgaccacgccctgggatgactttattgtccggatcctggtgggccgctaccacgcggtccatctggtggcgggacacgatcaccacttcggccacaggaaccagggcacaccggagctgctggcgcagaagtgcgcccagctgggcctgggctgtgacatcatccccaaggtggaggtagcaggcatcaccgtcagctccacctacatccgccggttggtggagctggggcagatcagccgggccaaccgcttcctgggccacccccacaccctgacaggcacagtccgccacggccggggcatcggctcctcccaactgttccccactgccaacctcgtcattccgcctcatgtgctggtgccgagccacggagtatacgccacccgggccacactggaggacggctcctgctacgccgctgtcaccaacgtgggcacccgccccacggttcaaaacggctcggacatcacagtggaggcctgtctcctggacttccagggggacctgtacggtaaacagctgcggctggagttttatgagcatctgcgccaggaggtgcgcttcgactccctggacgccctgcgggcccagatccagtcggatgcagacgccacccggacctatttcgcagacggggtccccaccttccctgccctttgatcctccatgaaacagcgcggagtccggaatcggactccgcgctgttttcagatcagccacaccgtcagccacaccaagccgatcccggcagcgcccatcagggtgtagaccgccggggaaagatcccgccagatccggctgaaccgcccatggtctccgccggcatagtttcgcgccacccggcgggcctcctccaccagctcccgggcggtgacgccctcgccggccgcatcgttccgcacgatgaagatcgcctgctcaaaaaaacgctggtccggggaatccaccaccacgacccgtctggaaatgcctttcaccatccgctttacgcctcctgcctctcacagaatttagatggttccattttgtctcagcgcgggaaaatttataccgcctctcacacctttttcacaccgctctcccggctgagatacagcacctgaaccccgcagtcgtcctgaagattctcccgccggacgctctcgctgaggatcagtcccgccagggtctgcggatcctctccatcccagccggccagcaggttttgaagccattcgtcccggcccgggtctgccaccccgtcgctgaccattactacaaagcttcccggctccagcgtggcacgggtcacatccggagccgccgccccgccccgcagacccgccggcagggtcccgccggtgatccgccggacagtgccccccttcttcacatagctgggggccgcgccgtatttgaagaaggccgcctcccccgtctccggtctgcaggtgatgagatcaatggtggtgaagcttccggtctccgcgccccgcagggccatggctgcgttcagggtcttcatggccgcctccggctcgatgcccgcctgcaaaaactgctccaacagacggcaggtgagggcggactcccgccgggctgcctctccgctgcccatgccgtccgccagcagcaggcacaggaggcccccctccgtgcggaaggagaccaccgtatccccacagaccgtctccccctccttgggccgcagggccgcgccaatgcggcagagatccgcctcccctgctgtggcacggacctcccccaaaccggcagcggtggcggtcagcagttcactgagctgggcgtactggcccctggcgctgcggcgggtctcctccagctgccgccggtactgccgccgcagcaggaatgcagagagctccccattgacggcggtgagaaagtccggcaggtggatgcaccggtccgcgaagtagctgggaaagtccttggccagcgcgcgcccccgctccagcaggaagggcgtggcgtcgttcagggcgttgaaggtgccggtgtactccttctgccaacagagctcgcacagggcgcagccccggcacaccttttctgccgcccggtcaaagaccaccgccgggttctcctccgtggacaccggggccgccctgcccatgctgtcgtacagggcccgcagagcggcggccatccgggtcagctgggcgcgcatcccctccagcgcggcgggaaactccggtgtctctccccgcatcacccgcttgccgccgaaggctcggcccggcagcatcaaaaacaggaccgctcccaccgcggcctccggcagcaggggcgtggagaggcccgccggcagggcggccagagccgccgctccccagaatgccagcgccgcccagatccgccttccgctactgcggctcccagccagaaggcccgccagaccataggccgccccgaagaggacgccgccccggccggaacagaagtccgccgccaggcccgcccccagtccggcggctaccccggtcatggccccccgctgataggcggtgtaggccagcagcagacacaacagtgaacgccccacggagacaccggccagttctacgtccaccagcgccagcagaatggagcctgccagaaacagcagactatctggctccggccgctcccctccggcctgcagcaggggctgataataccatgcggagatgcctaccagggccgttgccgcaaggcagggcgccaggtttcgcagggggacaaggactggagcacgtagatgccgctcaccgccagaaacagtcccgcccctgccagagggtgaaacagcggtccctccagcagcttcagcccctgaaaggccgccgcggtggtaaagatcaaaatcgcagcggccaaaaagggcagcgcaccggaaaagtccagaaacagcaccgcccccacgccagcgcccagcagggcggcgatccctcctgcccctggcccacaggccgccacgcaccccagggcaaagggcgcgtaatcccccggcgtctgggtggcggtcagcgccgccgccaaaaaaaatcggatgccccaggccagcagctgtgccggctggtgccggctccatatcatgtccctgtgccccacagcttgtccctcctgtattccgccgtgaagtccacggcctctttggttttttccactattttacaggctgtgtggaaaaaatcccgtcgggaaaagaaagccgcgccatttccgggctggatgcccatagtggacttttacggccggatatggtatgataaactatcatgttttcattggaaaggacggcccgccttgaacatcggcacgcttaccatcaactcctccctggccctggcccccatggccggggtcacggacgtcgccttccgccagatctgcgcggaattgggggcgggatataccatcacggagctcatctcctccaaggccctgtgctaccacgacaagaagaccctgtccctgctccagcagtttcccggggagcaccctgcggcagtgcagatcttcggcagtgacccgatctgcatggcagaggcagcccagatcgccctggagcattccggggcggatgtggtggacctgaacatgggctgccccatgggcaagatcgtcaacaacggcgacggggccgccctgatgaaggacccggaaaaggccggacgcatcatggaggcagtggtgaaagccgtctctgtgccggtgaccgccaagttccgccggggctgggacatgggcagctgcaactgcgtggagttcgcccgaatcctggagcaggcaggggcctccgccgtggcggtccacggccggacccgggcccaggtgtacagcggtcaggcggactggacctgcattcgggcggtgaaggaggctgtgtccatcccggtgatcgccaacggcgatatctggaagccggaggacgcggtccgcattctccagcacaccaaagcggacatggccatgatcggtcgcgggtgcttcggcaacccctggctgttccagcaggccaaagccgcgctggagggcaagcccatcccgcccctgccgccgcttgcggagcggtgcgacacagcggtacggcagtttgagctggccgccgcgtccaagggcgagcgggtagccgtgctggaggcccgccgccactactgctggtatctgaagggcgtgtcccactccggctactacaaggaacagatcgtgcagatgaacacgctggaagacgtgtatcgggtgacgaaaggaatcaaaagggatttgagatgaacgagcaatcgcgggaacagcagctggtctccgccgcccgggacggggatatggacgccttcgaggcgctggtccatctgtatgagaaacgggtgttcgccctgacgctgcggatgtgcgggaatcccgaggatgccgccgaggccgcccaagaggcatttctcgccgcctggcaggggctggcattcttccggggagaggccagcttctccacctggctgtaccggctggtgtccaacgcctgcgtggacttgctgcggcgtgatggccgccgccgggcctcggccggcccctccctggatgacgaggagctgaatctggacgtgcccgatccggcgccctctccccaggacgcggcggagcggcaggagctgcgggaagagattgagcggggcctctccgccctctcgccggagcaccgggaggtgctgatcctccgagagattcaccagctgcgctatgatgaaatcgcggactccctctctctggatgtgggcaccgtgaaatcccggatcagccgggcccggaaacagctgcggaattttttgctgaaaagcgggaacttttctccgctgccggcgtctaaaggaacagaaaaggagggctgacaatgacatactgcaaggagttttcggccctgctggacccctatatcgacggagagctttccccggaggaaaccgcccgggtgcgggagcatctgcatacctgtgacggctgccgggcctatgtccaggccgcgctggccatacgggacgcgtttcccgaggcagaggatacccctgtgccggatggcttcgccgcaggcgtgatggctgccatccgggcggacgccgcccccggaagcgccggagaccccggtgggcaaagacgctgctccccttggccgcctgctgtgccgtcgtggtgctggccgtctccggcctgccccgccccggcggcaccgctgtgacggaccatccggaatcccatgcagagattgcggccccagcagaggccgctgtgcccaacgtggacagcgttgaggaggacaccgccgccacggcctatgcaacccagtccgacgaggacacggcagacgtcccggattccactgtgtctgaggcaatcgcgccggaggcggataccgttgcgcccggcacacaggaccagcttgctcccgcctccgattccaaaagcagcattttgccccgggaagggagttctgccgatgtgccggagacggccccggccaccttcgcgatccaatcccccggcctgacgctgacggcggaggaggccggaagcctgctggacagctatacgctcatctctgaatcggacgggactctggtctacgaattgaccgccgccgaatataccgctctgctgcagcagctggaacagcaggggctggccattgcaggcgccgccaccgcagaggaggcggaggccgacggaaccattctggtccacgtgattcccggttaaaaaagcagaagggacgccgaaattttttgcggcgtccctcttcccttttttgaaagcttgtgatataatattatttcgacaggtgccatctccctgtccaagcgtccgacactgggcgttcgttcggcggtcttcgtcaatcgccgttctctaaacaaaaaaatggaggttgcccgtaccttaccacgggcgttttgctgcgttttcgtatcaaaggcctccgacatcattcaaggaggtctttcttttatgtccaaacccagattcaccacacagcagatggccgctgccggtatcatcgccgccatttacgccgccctgacgctgctgctgcccattccccagtatggcggcatccagttccgggtggcggaggccatgacggtcctgcccttcctgttcccggaggccatccccggtcttaccgtcggctgtttcctggccaacctcctgggttctcccattcctctggactggatcgtgggtacggcggccaccctgctggctgcgctctggacatcgaagctccatcacagggcgctggcgcccctgccgccggtgatctgcaatatggtgctggtaggtgcggagatcgcctggttttccacccaggagggtgccgccttctggcccgcgttcgccttcaactccctgaccgtggggatcggcgaggccgccgcttgcttcattctgggctccctgctgctgcgggtcctgcccagagtccccgcactgaagggccggatagcctcttcccgcatctgatgccactctgcgcaaaaaagaagtcccgcgtccgttggacgcgggacttcttttcacttagcggtgaactcgtcctttccggcgccgcacagggggcacacccagtcggcgggcaggtcctcccacttggtgccgggggcgatgccgttgtccggatcgccggcggcctcgtcatacacatagccgcagagatcgcattcgtactgtttcatttgaaagatcctccttctgttataaacgggcgatacacgcctggattccggtggagacagtgcttacttcagcttcttccggatggccgccttgacctccggcgacagcagccggccggcggcccgtactggcagcggcggcaggcggcagaactcccggcgcacctggtcgaagggctccagggcgtaggcggcaaagaatgccgtccgctccggcggcaggggaatgggagatgccagccggggatttccggcaatggcccgttccggcgggaagggctgcttggccagcgggagctggtcaaaaatgtggctgccgtggggggtgttcaccaacagcaggctgatccccttctcctgctggtccggcagctcatccggccgcaggccccagaaatcccccagtgtcagatcgcccacccgggtcatggaggcgtagggacagcggtagcagctgggccgcaggaacagcgcccggccgaaggcccggccgtattccgtgcggaacagcggcgcggtatccacggtgccgtcgccgtagaccgcggtaaaatggctgtccttccatccggcgaccttgttgcggaaacggaccgcctgcagcggctgctgccggcgcgcctccaggctccgggccatgtcctcccacacgccgggagagggcacgccgtggcacaccaggtcgcaggtggtcagattctccggccgtccgcccagatagcggtacagcccgtccacctggcagggtgtgccggaaaacagcactggtcgctggtccaaccagcgccgcacctcccgaaagacgccctccagatcgctctggacgtacttggcgccccgcaggcgccacagctcctccttgcggaagcaggcggtgtgccgcagatgctggctgccgtcaaaggcggcgccaaagaccacgccgccgctttccaggatatactccgccagcagggtgaacacgccgcccgaggtggagtctcttcggatctcatcgtttctattccaggccgcgaatacagcgggcatggagctctgaggccgctcccgcaggacggggcacaccgccgtgcagtgcccgcaccgcacacaggccgctccgtcgatcaccggataggcaaagccctcccggtcccgctccatggtgatggcgtccttgggacagccgctggcgcaggccgtgcagccggtgcagtgggtgtggtccgccaaatggggcaagggccgttcctctgccttgacaggcgcctcctccggtgtatggggccggtcctccagggcgcagcgcagatagtccagggacaacttccgctcccggccgagccgctcccccaccgccgcccagtcgatgggcgccgtcaggtccgcggtatctcccttgccgatgatccgctcccccagtcccaggcggctcaacaggctgaaggtccgggaactctccggcgcagccatctctgccggtgccaccgccgtaaagaagggcttttggaactggacggagaacaccgttccgtggaaggagttggtgcacacataggcggcatcccggaacagacccagaaactccgccggaccggcgctgagaatgcagcgggccttggggtggaccttctggcgtacgccgcacagctgcaccaccggcagccccgtctcctccgccaggcggcggatatagggtgccagggcgtcggggcggctgatgcaatagcagaggatatagccccggcccgcgcctccgtccctggctgcggccgcccaatccgttctctccagcagcagcgtgggatccagcaccaccggcacgtccttcccggtgatgtcccggacaatgccctgcccctgccgctcccggacggacaagtgggagaaggactccagataggtccgcagctcctcctccatgccgtccgggatgcgggggatgccgaaggatggggcataggcgatcttccgcttgtgggagaaggccccgaagaacaccgggtcgaaccggccgtcggggaagatcttcgggttccaaatctggtcactgccggagagcagcacatcgtagggcagctccgcctgccgcagctcctccaggctctggtagcggcggccggaaatgttcagattctcccgggaaaatgcctcaaaccgctcgtatcgggccttcagcgggccatagtgcagggcggtgtgggcgtcatgggcggcgcttcccaggccagtgggccgctggaacagggtattgtcctggttcacgtagtagtcgatgatctcgcattcgctccccagggacgccaccgcccgctccgtggcgtaagcctgcagcatggcgccgtagtgatggatatggtaaaaggtcagcagtcctgttttcaccaagtgtcttcctttccgcagtccggatatcccgccgggcgggtcactgcctgtccagaatggcgtcggcgtcccgggatgccagaaggtcgtcctccgccacccagtccgccacatccaccacgtcgaacgccgtggcggtccggcggatcaccacctctttcagcccggcgttgatgaccagcctccggcacatggagcaggaggtggcatctcccagcagttccccggtccgggcgtcccggcccactaggtacagcgtgccgcccaccatgtcccgccgggaggcggagatgatggcgttcgcctctgcatggacgctgcggcacagctcataccgctctccccggggaacctgcatggcctctcgggagcagtagcccagatccacgcagttggcccgccccggggcgcaccgttgtagccggtggagatgatctcgtcgtttttcacgatgatggccccatagacccggcgcaggcaggtggcccgctccagaacggtctgggcgatatccaggtagtagttggctttgctgatccggtccatgggcgacacctctttctatcgagttcctctattgtatcatgatgccgccgcagtttgcaagaactctccccactctggaagggatttctgttggaagtcaccccagggggcgccggagcccgttctccagccccgcccgcacggcgatcatctctgcggccacggacacggcaatctcctccggcgtctgggcgccgatggccaaaccgatgggagcgtgaaggcgggcgtactcctcgtctgtgaaccccgccgccagcagccgctcccggcacagggccagcttcctcttggagccaatgcagcccaggtatttggcgccgctgcgcagcacctgagtcagcacctcgtagtccgcctgatggccccgggtcatcaccaccacatagtcctccggcgtcaccgtcacctgttcggacagccgggcgaagtccccgcagagggtcttctctgctttggggaacagcgccgggtccgcgaactccggccggtcgtcgtacaccacggggcggaagcccagggaagccagcaccggcaccagggcctgagacacatgtccgccgccgaagagataggtccgcccggccttcaccaccgggatggacagccacttccgggcaaagaccgcctgattcccgcacaggagctccagctcctccggcaggatatccagatgacggggcccggtccggtctgccaggcccatggccgtcacctgctccccctcgatccgccgcaggagccaggtgtcccggtttccgccgtccgcctcgatcagatcccgcaaaacggcgatgatcctctgttctcccgcggggaggtactggaactgcaccgtcactcccccgccgcagaccatgcccaggctggcggcgtctcccagggtaaagcggaactgccgcagggcgtcgcccccccgctccagcagctccgccgccaggcgctggcactcgaactccacgtttccgccgccgatggttccggtgatcccgccgccggggaacaccgccatcatggccccggcccctcggggggtggagccgtcggaggcggcgatgctcaccagctccaccggacgcccctcctccagagcgtggacgatctctctgaaaaattcccgcatatcagccgattcctccgttcacagcgcccaggatcaggaccagtaccgtcacgccgcagtacagatattttgccgtcgggtaaaaccagcggcccagagggcgccgccgggccagattcacctgaaccaagcagtcctcctttttcagcacccagtagaagaacacccccgccagcagcgcgccgatgggacaggcgtagatggagcagacatccatccagccggagacgatgccctggatgcacagccccacggccaggcccacgacgccgatcaccgccacagcagtcccccggctgaggtgcagcttctcctgcagggtggcggtgggagcctcgaacaagttcaccagggacgtcaccccggcgaacaacgccgccacaaagaacaccgccatgaggatccggcctcccggcatctcccggaacaggttgggcaggtagatgaacatgaggccagggccgctctgggtcagggtctcccccgccgtggccatggccgggataatgaccagggcgctgaggatcgcggccatgctgtcaaagaacgccactgtccgggcagactccggcacgtccgcctctttggagaggtaggacccgtagatcagggtgccgttccctgccaccgacagagagaagaacgcctgtcccagagcgtagacccataccatggggtccagcagtccctccggcttcaggacaaagatgtagcggtagccgtccgccgcgccgggcaaggtggcaatgtagatggccagccccacgaacaggcagaagaacaggggcatcatcaccttgttggcccgctcgatgccgccgccgatgccaagggccatgatgagcagcgtgcccgccatagcggccacctgccagccggtgttgccccaggaggacgccgcggtgtcgaaataggcggtgaatgcctccaccccttggttctccagcgcagcgcccgtaaaggacgccacggcgtacttcaaaatccaaccaaccaccacggaatagccgatggccatggccagagagcccgccaccgggatgaggcccagagcctcgccccagccccgccggcctgtgcgcctctctgccgccgtgccgaaggccgccacgggtccgccggatgcggcccggccgaaggccatctcgccgatgacgccggtggaggcaatcagcaccacaaagatcacataggggatcaggaaggtggccccgccgtaggcggacatccgggatggaaacagccagatgttccccatccccaccgcggagccgatgcaggccagcttgaatccccagcgggaccggaagctgtcccgtcttgtctgttccatgattttttcctctcttctctcaaaactgcggcggcccgccgcggcgcgcgtcagccggcgccccgcttttgcagctcctcacccagcaggcgcactgcctggtccagatagaattggagcggctgggattcccccacggccagccggatgctgcatcgctgagagggcagcagaatcttcaccgcctcgctgccgccaatggcctccgccatccggggagagacctcccccagcaagccgttgggcgtcagcacaccgatgggccccagcaggatatccgcccgccgggcgttgaacgccacggcgttctcgccggtggcgccgtcatccgcccccgcccgcagcatagcggcggtggccagagagttggtccccagcgcccgcacatggagactgggccactttttcttcacagcctccaccaggccccggcccatgccgccgccctggccgtccaccacggccaccagcagttccccacgcatcattctctccattcctccattttcagatctccctttcagcatacccattccgcccccgcttgtcaacttcttccgcagcgtccatcgcgccttgcagagcgcctgcgcccacccttgtatttttcccgcatggcagctacaatgggaggcgcaccaccgtgtcaaaaaatttttggagatattgaagaaatccggcccgcagtcccgtatgatagatgtcggacgacaaaaggaggtggcggcacggcgtgaacaaactgacaaacgcgtccttttcccagctggtagtccagtatgagcggctggtctacacggtctgcttccagctggtgcgggacgccgccgcggccgaggacctgacccaggagaccttcctgtccgcctacctccaccgggacgccatccctcccggctatgagcggcagtggctgtgccgcgtggccaccaacaaggccaaggactacttacagagcgcctatcagcgccacaccctgctgccgggagaggacaatatcccgccggggctgtctccccctgcggaggagacggtcctgcgcaggtcggctgcagctgaaatccgggacctgatcctccatatgcgccagccctaccagccggtgtgccggctgtgcctgctggaggaaaagacaccggaggaggcggccctggcgctgggccggccggtaaagaccatccatacacagctgtcccggggcaagcggatgcttcgggaggcattggaaaggagtgggaacgatgacatgctttcgccctgacgggcatttgacggacgcggccctgaccgcccttgtccggggggactgcctggaggagctggaccgcctggagctggcggaacatctggcctactgcgaccagtgcctccagcggtacacagagctgctgtctgagggaccgatgctgacccccgcccgctcctgccgggagagcctgcggcgccggatccggcagcgggccgtccagcttggcgtcagccggtacgccacggccgcggcggcagtgaccctggccctgacgctgctgtggggcagcggaaacctgtccggacgggtgcattccactgcgccctcgcttctggagcgggcgggcactgccctgacaaagtggaccgacgcctggccacaggcgtgggaggaggccctctccggcttctccggcctatttgacaatttcggcgtctcgccgcggaatgatctgacacaaggaggtacacacccatgacccatcgaaatggattcctgctcttcatctcttcctgcctctccggctgcggacagatgtatcagggctatatgaagcggggcctgtccctgctgctggccttctgcctgatcctttttgcctccacctatttctttctgggggcactggcgctgtttctgccggtgatctggctgtatgcctttttcgacagctatgcgctccggagccagctggccgccggcaccgcgccggaggacgccttcctcttcggcctgtccgatatggacagcaaacggctgggagagctgctgcgcaagcgtcacagtctcatcggctgggcgctggtggtagttggcgtctatatgctctacgacatactgttgagccagctgggcggtctcttcttcggttggttcggggagtggctatacggactgctgcgctatggcctgccccgcctggtcatcaccgtgctagtgatcctgctgggcctgtggtttatccggggccccaaggacaagacgcccattgacgacgagatcccccctttgcgccgcctgcctccagcgcggccggggcttgcgccgccgatccggcggaggccagggcggaagacgttgcatcagaccgctccgctgcgggaaacgccccggagggagaggaggcccaccgtgatgaacagccctgagcagacgccggaatcccgtccggcccgggatcgccgggtgggcaccttcaccttcggcgccgtgctggtgatctgcggtgcgctgatgctggtgagcatgttcttcccctccctggatctgaccctggccctgcagctctcgcccctgatcttggtctgtctgggcgtggaggtgctgctggccagccgctccggcgggaaaatccgctacgactgggtgggcatggtgctttgcttcgtcctggtcaccgcagcgctggtgttcttcggcatcgcctggtgcctggtgtaccacccggaggccgtcatccactactgatacgggtctgcgaaggccccggtgcattgcaccggggccttaccctttcttcttggttttcccgggaaaatccggtataatggagaaaatacctgccgcagaaaggaagaatcctcatgtctgattcgtttgaaatgcgccccatcgcccgcatccgcagcgacttcggctccaagttcggcgtccctcgtcagagcggtctggtggacgcgttggaggccgccgtggtgttcgaggagccctaccgcaatcctgacgccctgcgggggctggagggattctcccacatctggctgatctgggcctttcaccagtcccagcggccggaatggtcccccacagtccggccgccccggctgggaggcaatcagcgggtgggagtctttgccagccgctcccccttccggcccaatcccatcggcctctcctccgtgcggctggaccacatcgcgtacacggacgccttgggcccggtgctccatgtccgtggcgcagacctggtagacggcacccccatcctggacatcaagccttacctcccttacggggactgccacccggaggccaccggcggctttgccagcgagccggcgcgtcccacgctggaggtggaaatcccacccgccctgctggaccaactgcctccggaccggcgggaggccctgcgggatgtgttggccttggatccccgtccccggtatcagcaggacccggaccgggtgtacggcttcctcttcgccgggcaggaggtgagattcaccgtggatggagaccgcctgcaggtcgtggacatcaaatgaacgcaaggcaccccgggatatttcccggggcgcccgtcttttccgggcactcagcgcatggccagcgtcacgtcgccggtcaccgccagctcgccgtggttgtagacctcggcggagcaggtggcaatggccttctccacccgctcggaagccatcttggcgtggatctcgatggtatctcccggcaggatcttcttcagaaaccgcacattattgatccccaagaacagggggatcttccccgcataccgctccgcggacagcagcaggatatccgccgtctgggccatgcattccacagagtacacgccgggcagcaccggctcaccggggaagtggcccttgaaaatctcgcgggccgggtccacaaaaaatgtggtcacgatgtggtcgcctgcctccatctcctccacggtatccaccagcagcatggggtcccggtgggggatgatggccttgatctcttctttggaaagcttcatgatagtggttcctctctttcgcgcaaaacgctccgtatataagccgcgccgggacagcggcacggctctgcctctttttattgtactgccgacagggcaaaatgcaagagataatttgcgctccggatcacaaaagagagccgccctcccgggcggctctctcattttccagatggggtgccttacttcgcagccttggcggccttgatggcctcgatcagcatgggggtgaccttgaacaggtcgccgcagatgccgtagtcggcaatctcgaagatgggcgcagtgtcgttcttgttcaccgcgatgatgcactcggagtcctgcataccggccttgtgctggatggcgccggagatgcccagggcgatgtacaccttcggatgcaccgtcttgccggtctggcccacctgatggtcggcagacagccagccggagtcgatggtggcacgggagccgcccacgacgccgcccaggacgtccgccagctcctcagccagcttgataccgccctcgacatccttgctgatgccgcggcccacagacacgatgtagtccgcgccgatcaggtccaccagcttcttggcggccttcacgacctccacaacctcggtgttcaggtcgctctcgctcagctggaagctgggcttcacgatctcgcacgcatccgccttggcctggtcgaagacgttcttcttcatcacgccggggcgcaccgtcgccatgcagggacggaaccgcgggcagatgatggtggccatcaggtggccgccgaaggccggacgggtcatcttcaggttccggtcctccatatcccacttctggctgtccacgtccagggtgctggactcacgcaggaactggatgtagttcgccacatccacgtccaggtgggtgcagtcggcgcacaggccggtatgcagacgggccgcgcagcggggccccaggtcacggccgatgttggtggcgccgatcaggaacgcctcgggcttcagatcctcgatcacgtcgcagatgaccttggcataggcatcggtgttgtagacggccagcagggggctctcgcacaccagcaccttgtcggcgccgtagccgcccagctccttggcagcggactcgatgccctcgccgcccagcagcaggccgcacaggttcacgcccagctcgtcggccaggtcgcggcccttggagatcagctcaaagtcggtgggcatcagtttgccctcgcgctgctcgcagaagacccacacatccttgaaagcagcgatatcagcgctattgaaattggacattgttcaaatactcccttctcagatgatgtgcttggcggccagaatggaagccagctcctcgcaggtctctttgccggcaccctccagcatcttgccggcgcccttctggggcggggtgaagctcttgaagatgttggtgggagagcccttcaggccgatggtggtggcgtcgatcaggggatgatccttcagcttctcatagtcaaaggtctccagcggcttgttgtaggtggcatagatgccgtcgatgctcatatagcggggctcgttcagctccttgatgcaggtaagcaggcagggagtcttgaccttgatggtcatgtagccgtcctccagcatccgcttgacggtgatggtgttgccgtccttggtgatgtcggcggcgtaggtcacctggggcaggtgcagcttctcagcgatctgggggcccacctgggcggtgtcgccgtcgatggcctgccggccgcacatgacgatgtcgtcctcctccacaccgatggtggagatggcggcggccaggatctgggaggtggcgtatgtatcggagccgccgaactcgcgggcggataccaggacaccctcgtcagcgcccatggccatcagctcccgcagcatgccggctgccgggggcggacccatggtgacgaccatgaccttgcagccggtggcatccttcagcttcagggcagcctccacggcgttcatgtcatcggggttggtgatggtctgcatggaggcacggttcagggtgccatccgggttcaccgccaccttgccggaggtatcggggacctgcttgacgcaaacaatgatcttcataattcgttcttcctcctcttacaggccgatattgccggagatgaccacacgctggatttcgctggtgccctcatagatctcggtgatcttggcgtcgcgcatcatgcgctccaggggatagtccttggtgtagccgtagccgccgaacatctgcagcgccttggtggtggtcagcatggcgtgctcagagcagaacagcttggccatggccgcctccttggtgaagcgcttgccctcgcccttcagcacggcggcctgataggtcagcaggcggcccgcctcggagcgcatcgccatgtcggcgaaggtgaactgggtgttctggaacttgctgatgggcttgccgaactggacacggcccttggtgtaggccatggcctcttccatggcgccctcggcaatgcccagagcctgggccgcgatgccgatgcggccgccgtccagggtctgcatggcgatcttgaagcccttgccctcctggcccagcaggttctccttgggaacgatgcagtcggtgaacacgatctcggcggtgggggagccgtgcaggcccatcttctcttcgtgcttgcccacggagaagccggggaagctgctctccacgatgaaggcggagatgccgcgggtgcccttggacttgtcggtcatggcgaagaccacgaacacgtcggccacgtagccgttggtgatgaagatcttggagccgttgaggacatagtggtcgccgtccagcttggcctc

(The sequence listing continues in the following parts.)